(19) United States
(12) Patent Application Publication
(10) Pub. No.: US 2013/0165504 A1
(43) Pub. Date: Jun. 27, 2013

(54) METHODS OF INCREASING THE VIABILITY OR LONGEVITY OF AN ORGAN OR ORGAN EXPLANT

(71) Applicant: modeRNA Therapeutics, Cambridge, MA (US)

(72) Inventors: Stephane Bancel, Boston, MA (US); Antonin de Fougerolles, Brookline, MA (US)

(73) Assignee: modeRNA Therapeutics, Cambridge, MA (US)

(21) Appl. No.: 13/723,267

(22) Filed: Dec. 21, 2012

Related U.S. Application Data
(60) Provisional application No. 61/578,271, filed on Dec. 21, 2011.

(51) Int. Cl. A61K 31/7088

(52) U.S. Cl. CPC A61K 31/7088
USPC 514/44 R; 536/23.5

(57) ABSTRACT

The invention relates to compositions and methods for the manufacture and optimization of modified mRNA molecules for their use in improving organ viability and/or longevity.

### CROSS REFERENCE TO RELATED APPLICATIONS

[0001] This application claims the benefit of U.S. Provisional Application No. 61/578,271, filed Dec. 21, 2011, entitled Methods of Increasing the Viability or Longevity of an Organ or Organ Explant, the contents of which are herein incorporated by reference in its entirety.

### REFERENCE TO SEQUENCE LISTING

[0002] The present application is being filed along with a Sequence Listing in electronic format. The Sequence Listing file, entitled M14USSEQLST.txt, was created on Dec. 21, 2012 and is 845,755 bytes in size. The information in electronic format of the Sequence Listing is incorporated herein by reference in its entirety.

### FIELD OF THE INVENTION

[0003] The invention relates to compositions and methods for the manufacture of modified mRNA.

### BACKGROUND OF THE INVENTION

[0004] The preservation of organs, whether for research or in an attempt to increase viability or longevity for future transplant opportunities, is an area of intense investigation. Historically, preservation has been focused on temperature and ischemic control with devices and compositions which attempt to reduce the damage to the organ or tissue. Reperfusion and soaking solutions have been utilized in an effort to mitigate cellular damage to some success. Devices such as ex-vivo organ care systems and portable organ chambers have also been used to prolong the useable life of organs and tissues.

[0005] There remains however, a need for a more robust system for the direct modulation of the physiology of cells and tissues to prolong organ viability while avoiding the destructive reactive systems in place such as free radical damage and activation of the immune system.

[0006] The present invention provides modified RNA molecules, specifically modified mRNA molecules, which function to optimize cellular physiology via improvements to protein synthesis. The optimization involves the use of novel chemistries incorporated into mRNA molecules which will deliver a translatable transcript of interest.

[0007] Naturally occurring RNAs are synthesized from four basic ribonucleotides: ATP, CTP, UTP and GTP, but may contain post-transcriptionally modified nucleotides. Further, approximately one hundred different nucleoside modifications have been identified in RNA (Rozenski, J, Crain, P, and McCloskey, J. (1999). The RNA Modification Database: 1999 update. Nucl Acids Res 27: 196-197).

[0008] The role of nucleoside modifications on the immuno-stimulatory potential, stability, and on the translation efficiency of RNA, and the consequent benefits to this for enhancing protein expression, producing therapeutics and providing tools useful in organ longevity are described herein.

### SUMMARY OF THE INVENTION

[0009] Described herein are compositions and methods for the manufacture and optimization of modified mRNA molecules for their use in improvements to cell viability. Specifically disclosed are methods for increasing the viability or longevity of an organ, tissue, explants or portions thereof.

[0010] In one embodiment is provided a method for increasing the viability or longevity of an organ or tissue explant, or portion thereof comprising contacting said organ or tissue explant, or portion thereof with a composition comprising modified RNA (e.g., modified mRNA). Any organ, tissue or portion thereof may be treated with the compositions of the present invention. Organs may be selected from the heart, lung, brain, liver, basal ganglia, brain stem medulla, midbrain, pons, cerebellum, cerebral cortex, hypothalamus, eye, pituitary, thyroid, parathyroid, esophagus, thymus, adrenal glands, appendix, bladder, gallbladder, intestines (e.g., large intestine and small intestine), kidney, pancreas, spleen, stomach, skin, prostate, testes, ovaries, or uterus. Tissues may be selected from heart valve, bone, vein, middle ear, cartilage, tendon or ligaments.

[0011] In one embodiment the modified RNA composition comprises a formulated modified mRNA and the formulation may be selected from saline, lipids, lipidoids, lipidoids, polymers, liposome formulations, lipid nanoparticles, rapidly eliminated lipid nanoparticles, dynamic polyconjugate formulations, atuplexes, DBTC formulations, PLGA polymers, protamine based agents, cell penetrating peptides, conjugates of sugars, hydrogels, sealants (e.g., surgical sealants) or steroids, and cell-based carrier systems.

[0012] In one embodiment, the modified mRNA is administered to a host organism. That host organism may be a donor or recipient host. Donation does not necessarily suggest that there is a recipient organism. Donation (or harvest) of an organ or tissue may be made in the absence of a recipient.

[0013] In one embodiment, administration to the donor organism occurs either prior to any procedure to remove the organ or tissue or during removal. Administration may be made by soaking, contact, or by delivery to the blood of the donor or recipient. Furthermore, administration may be facilitated at least in part by the use of, or in combination with, a medical device, system or component such as an ex-vivo organ care system.

[0014] In one embodiment, the modified mRNA administered is a pharmaceutical composition which is formulated.

[0015] In one embodiment, the modified mRNA encodes a polypeptide which acts as a radical scavenger or an immunosuppressive agent.

[0016] In one embodiment the modified mRNA encodes a protein such as protein a4beta1, VCAM-1, VEGF, neuregulin1 or thymosin beta-4.

[0017] The details of various embodiments of the invention are set forth in the description below. Other features, objects, and advantages of the invention will be apparent from the description and the drawings, and from the claims.

### DETAILED DESCRIPTION

[0018] Described herein are compositions and methods for the manufacture and optimization of modified mRNA molecules for their use in improvements to cell viability. Specifically disclosed are methods for increasing the viability or longevity of an organ, tissue or explants thereof via the use of modified RNA molecules.

[0019] In general, exogenous nucleic acids, particularly viral nucleic acids, introduced into cells induce an innate immune response, resulting in interferon (IFN) production and cell death. However, it is of great interest for therapeutics, diagnostics, reagents and for biological assays to deliver a nucleic acid, e.g., a ribonucleic acid (RNA) inside a cell, either in vivo or ex vivo, such as to cause intracellular translation of the nucleic acid and production of the encoded protein. Of particular importance is the delivery and function of a non-integrative nucleic acid, as nucleic acids characterized by integration into a target cell are generally imprecise in their expression levels, deleteriously transferable to progeny and neighbor cells, and suffer from the substantial risk of mutation.

[0020] Provided herein in part are nucleic acid molecules encoding polypeptides capable of modulating a cell's status, function and/or activity, and methods of making and using these nucleic acids and polypeptides. As described herein and as in copending, co-owned applications International Application PCT/US2011/046861 filed Aug. 5, 2011 and PCT/US2011/054636 filed Oct. 3, 2011, the contents of which are incorporated by reference herein in their entirety, these modified nucleic acid molecules are capable of reducing the innate immune activity of a population of cells into which they are introduced, thus increasing the efficiency of protein production in that cell population.

### Modified Nucleic Acid Molecules (Modified RNAs)

[0021] This invention provides nucleic acids, including RNAs such as mRNAs that contain one or more modified nucleosides (termed “modified nucleic acids” or “modified nucleic acid molecules”), which have useful properties including the lack of a substantial induction of the innate immune response of a cell into which the mRNA is introduced. Because these modified nucleic acids enhance the efficiency of protein production, intracellular retention of nucleic acids, and viability of contacted cells, as well as possess reduced immunogenicity, these nucleic acids having these properties are termed “enhanced” nucleic acids or modified RNAs herein.

[0022] The term “nucleic acid,” in its broadest sense, includes any compound and/or substance that comprise a polymer of nucleotides linked via a phosphohdiester bond. These polymers are often referred to as oligonucleotides.

[0023] Exemplary nucleic acids include ribonucleic acids (RNAs), deoxyribonucleic acids (DNAs), threose nucleic acids (TNAs), glycol nucleic acids (GNAs), peptide nucleic acids (PNAs), locked nucleic acids (LNAs) or hybrids thereof. They may also include RNAi-inducing agents, RNAi agents, siRNAs, shRNAs, miRNAs, antisense RNAs, ribozymes, catalytic DNA, tRNA, RNAs that induce triple helix formation, aptamers, vectors, etc. In preferred embodiments, the modified nucleic acid molecule is one or more messenger RNAs (mRNAs). Modified mRNAs, as used herein may also be termed “mRNAs”. As described herein, the nucleic acids of the invention do not substantially induce an innate immune response of a cell into which the mRNA is introduced.

[0024] In some embodiments, the nucleic acid is translatable.

[0025] Provided are modified nucleic acids containing a translatable region and one, two, or more than two different nucleoside modifications. In some embodiments, the modified nucleic acid exhibits reduced degradation in a cell into which the nucleic acid is introduced, relative to a corresponding unmodified nucleic acid.

[0026] In another aspect, the present disclosure provides compounds comprising a nucleotide that can disrupts binding of a major groove interacting, e.g. binding, partner with a nucleic acid, wherein the nucleotide has decreased binding affinity to major groove interacting, e.g. binding, partners.

[0027] In some embodiments, the chemical modifications can be located on the sugar moiety of the nucleotide.

[0028] In some embodiments, the chemical modifications can be located on the phosphate backbone of the nucleotide.

[0029] In certain embodiments it is desirable to intracellularly degrade a modified nucleic acid introduced into the cell, for example if precise timing of protein production is desired. Thus, the invention provides a modified nucleic acid containing a degradation domain, which is capable of being acted on in a directed manner within a cell.

### Modifications

[0030] The modified nucleic acids and modified mRNA (mRNA) of the invention may contain one, two, or more different modifications. In some embodiments, modified nucleic acid molecules and mRNA may contain one, two, or more different nucleoside or nucleotide modifications. In some embodiments, a modified nucleic acid molecule or mRNA (e.g., having one or more mRNA molecules) introduced to a cell may exhibit reduced degradation in the cell, as compared to an unmodified nucleic acid molecule or mRNA.

[0031] The modified nucleic acid molecules and mRNA can include any useful modification, such as to the sugar, the nucleobase (e.g., one or more modifications of a nucleobase, such as by replacing or substituting an atom of a pyrimidine nucleobase with optionally substituted amino, optionally substituted thiol, optionally substituted alkyl (e.g., methyl or ethyl), or halo (e.g., chloro or fluoro), or the internucleoside linkage (e.g., one or more modification to the phosphodiester backbone). In certain embodiments, modifications are present in both the sugar and the internucleoside linkage (e.g., one or modifications, such as those present in ribonucleic acids (RNA), deoxyribonucleic acids (DNAs), threose nucleic acids (TNAs), glycol nucleic acids (GNAs), peptide nucleic acids (PNAs), locked nucleic acids (LNAs) or hybrids thereof). Additional modifications are described herein.

[0032] As described herein, the modified nucleic acid molecules and mRNA of the invention do not substantially induce an innate immune response of a cell into which the mRNA is introduced. In certain embodiments, it may desirable to intracellularly degrade a modified nucleic acid molecule or modified mRNA introduced into the cell. For example, degradation of a modified nucleic acid molecule or modified mRNA may be preferable if precise timing of protein production is desired. Thus, in some embodiments, the invention provides a modified nucleic acid molecule containing a degradation domain, which is capable of being acted on in a directed manner within a cell. In another aspect, the present disclosure provides nucleic acids comprising a nucleoside or nucleotide that can disrupt the binding of a major groove interacting, e.g. binding, partner with the nucleic acid (e.g., where the modified nucleotide has decreased binding affinity to major groove interacting partner, as compared to an unmodified nucleotide).

[0033] The modified nucleic acid molecule and mRNA can optionally include other agents (e.g., RNAi-inducing agents, RNAi agents, siRNA, shRNA, miRNA, antisense RNA, ribozymes, catalytic DNA, tRNA, RNA that induce triple helix formation, aptamers, vectors, etc.). In some embodiments, the modified nucleic acid molecules or mRNA may include one or more messenger RNA (mRNA) and one or more modified nucleoside or nucleotides (e.g., mRNA molecules). Details for these modified nucleic acid molecules and mRNA follow.

### Modified Nucleic Acids

[0034] The modified nucleic acids or mRNA of the invention may include a first region of linked nucleosides encoding a polypeptide of interest, a first flanking region located at the 5′ terminus of the first region, and a second flanking region located at the 3′ terminus of the first region.

[0035] In some embodiments, the modified nucleic acids or mRNA includes n number of linked nucleosides having Formula (Ia) or Formula (Ia-1):

[chemical structure]

or a pharmaceutically acceptable salt or stereoisomer thereof, wherein

[0036] U is O, S, N(R^{U})ₙᵤ, or C(R^{U})ₙᵤ, wherein nu is an integer from 0 to 2 and each R^{U} is, independently, H, halo, or optionally substituted alkyl;

[0037] - - - is a single bond or absent;

[0038] each of R^{1′}, R^{2′}, R^{1″}, R^{2″}, R¹, R², R³, R⁴, and R⁵ is if present, independently, H, halo, hydroxy, thiol, optionally substituted alkyl, optionally substituted alkoxy, optionally substituted alkenyloxy, optionally substituted alkynyloxy, optionally substituted aminoalkoxy, optionally substituted alkoxyalkoxy, optionally substituted hydroxyalkoxy, optionally substituted amino, azido, optionally substituted aryl, optionally substituted aminoalkyl, optionally substituted aminoalkenyl, optionally substituted aminoalkynyl, or absent; wherein the combination of R³ with one or more of R^{1′}, R^{1″}, R^{2′}, R^{2″}, or R⁵ (e.g., the combination of R^{1′} and R³, the combination of R^{1″} and R³, the combination of R^{2′} and R³, the combination of R^{2″} and R³, or the combination of R⁵ and R³) can join together to form optionally substituted alkylene or optionally substituted heteroalkylene and, taken together with the carbons to which they are attached, provide an optionally substituted heterocyclyl (e.g., a bicyclic, tricyclic, or tetracyclic heterocyclyl); wherein the combination of R⁵ with one or more of R^{1′}, R^{1″}, R^{2′}, or R^{2″} (e.g., the combination of R^{1′} and R⁵, the combination of R^{1″} and R⁵, the combination of R^{2′} and R⁵, or the combination of R^{2″} and R⁵) can join together to form optionally substituted alkylene or optionally substituted heteroalkylene and, taken together with the carbons to which they are attached, provide an optionally substituted heterocyclyl (e.g., a bicyclic, tricyclic, or tetracyclic heterocyclyl); and wherein the combination of R⁴ and one or more of R^{1′}, R^{1″}, R^{2′}, R^{2″}, R³, or R⁵ can join together to form optionally substituted alkylene or optionally substituted heteroalkylene and, taken together with the carbons to which they are attached, provide an optionally substituted heterocyclyl (e.g., a bicyclic, tricyclic, or tetracyclic heterocyclyl);

[0039] each of m′ and m″ is, independently, an integer from 0 to 3 (e.g., from 0 to 2, from 0 to 1, from 1 to 3, or from 1 to 2);

[0040] each of Y¹, Y², and Y³, is, independently, O, S, Se, —NR^{N1}—, optionally substituted alkylene, or optionally substituted heteroalkylene, wherein R^{N1} is H, optionally substituted alkyl, optionally substituted alkenyl, optionally substituted alkynyl, optionally substituted aryl, or absent;

[0041] each Y⁴ is, independently, H, hydroxy, thiol, boranyl, optionally substituted alkyl, optionally substituted alkenyl, optionally substituted alkynyl, optionally substituted alkoxy, optionally substituted alkenyloxy, optionally substituted alkynyloxy, optionally substituted thioalkoxy, optionally substituted alkoxyalkoxy, or optionally substituted amino;

[0042] each Y⁵ is, independently, O, S, Se, optionally substituted alkylene (e.g., methylene), or optionally substituted heteroalkylene;

[0043] n is an integer from 1 to 100,000; and

[0044] B is a nucleobase (e.g., a purine, a pyrimidine, or derivatives thereof), wherein the combination of B and R^{1′}, the combination of B and R^{2′}, the combination of B and R^{1″}, or the combination of B and R^{2″} can, taken together with the carbons to which they are attached, optionally form a bicyclic group (e.g., a bicyclic heterocyclyl) or wherein the combination of B, R^{1″}, and R³ or the combination of B, R^{2″}, and R³ can optionally form a tricyclic or tetracyclic group (e.g., a tricyclic or tetracyclic heterocyclyl, such as in Formula (IIo)-(IIp) herein). In some embodiments, the modified nucleic acid or mRNA includes a modified ribose.

[0045] In some embodiments, the modified nucleic acid or mRNA includes n number of linked nucleosides having Formula (Ia-2)-(Ia-5) or a pharmaceutically acceptable salt or stereoisomer thereof

[chemical structure]

[0046] In some embodiments, the modified nucleic acid or mRNA includes n number of linked nucleosides having Formula (Ib) or Formula (Ib-1):

[chemical structure]

[0047] or a pharmaceutically acceptable salt or stereoisomer thereof, wherein

[0048] U is O, S, N(R^{U})ₙᵤ, or C(R^{U})ₙᵤ, wherein nu is an integer from 0 to 2 and each R^{U} is, independently, H, halo, or optionally substituted alkyl;

[0049] - - - is a single bond or absent;

[0050] each of R^{1′}, R^{3′}, R^{3″}, and R⁴ is, independently, H, halo, hydroxy, optionally substituted alkyl, optionally substituted alkoxy, optionally substituted alkenyloxy, optionally substituted alkynyloxy, optionally substituted aminoalkoxy, optionally substituted alkoxyalkoxy, optionally substituted hydroxyalkoxy, optionally substituted amino, azido, optionally substituted aryl, optionally substituted aminoalkyl, optionally substituted aminoalkenyl, optionally substituted aminoalkynyl, or absent; and wherein the combination of R¹ and R^{3′} or the combination of R¹ and R^{3″} can be taken together to form optionally substituted alkylene or optionally substituted heteroalkylene (e.g., to produce a locked nucleic acid);

[0051] each R⁵ is, independently, H, halo, hydroxy, optionally substituted alkyl, optionally substituted alkoxy, optionally substituted alkenyloxy, optionally substituted alkynyloxy, optionally substituted aminoalkoxy, optionally substituted alkoxyalkoxy, or absent;

[0052] each of Y¹, Y², and Y³ is, independently, O, S, Se, —NR^{N1}—, optionally substituted alkylene, or optionally substituted heteroalkylene, wherein R^{N1} is H, optionally substituted alkyl, optionally substituted alkenyl, optionally substituted alkynyl, or optionally substituted aryl;

[0053] each Y⁴ is, independently, H, hydroxy, thiol, boranyl, optionally substituted alkyl, optionally substituted alkenyl, optionally substituted alkynyl, optionally substituted alkoxy, optionally substituted alkenyloxy, optionally substituted alkynyloxy, optionally substituted alkoxyalkoxy, or optionally substituted amino;

[0054] n is an integer from 1 to 100,000; and

[0055] B is a nucleobase.

[0056] In some embodiments, the modified nucleic acid or mRNA includes n number of linked nucleosides having Formula (Ic):

[chemical structure]

or a pharmaceutically acceptable salt or stereoisomer thereof, wherein

[0057] U is O, S, N(R^{U})ₙᵤ, or C(R^{U})ₙᵤ, wherein nu is an integer from 0 to 2 and each R^{U} is, independently, H, halo, or optionally substituted alkyl;

[0058] - - - is a single bond or absent;

[0059] each of B¹, B², and B³ is, independently, a nucleobase (e.g., a purine, a pyrimidine, or derivatives thereof, as described herein), H, halo, hydroxy, thiol, optionally substituted alkyl, optionally substituted alkoxy, optionally substituted alkenyloxy, optionally substituted alkynyloxy, optionally substituted aminoalkoxy, optionally substituted alkoxyalkoxy, optionally substituted hydroxyalkoxy, optionally substituted amino, azido, optionally substituted aryl, optionally substituted aminoalkyl, optionally substituted aminoalkenyl, or optionally substituted aminoalkynyl, wherein one and only one of B¹, B², and B³ is a nucleobase;

[0060] each of R^{b1}, R^{b2}, R^{b3}, R³, and R⁵ is, independently, H, halo, hydroxy, thiol, optionally substituted alkyl, optionally substituted alkoxy, optionally substituted alkenyloxy, optionally substituted alkynyloxy, optionally substituted aminoalkoxy, optionally substituted alkoxyalkoxy, optionally substituted hydroxyalkoxy, optionally substituted amino, azido, optionally substituted aryl, optionally substituted aminoalkyl, optionally substituted aminoalkenyl or optionally substituted aminoalkynyl;

[0061] each of Y¹, Y², and Y³, is, independently, O, S, Se, —NR^{N1}—, optionally substituted alkylene, or optionally substituted heteroalkylene, wherein R^{N1} is H, optionally substituted alkyl, optionally substituted alkenyl, optionally substituted alkynyl, or optionally substituted aryl;

[0062] each Y⁴ is, independently, H, hydroxy, thiol, boranyl, optionally substituted alkyl, optionally substituted alkenyl, optionally substituted alkynyl, optionally substituted alkoxy, optionally substituted alkenyloxy, optionally substituted alkynyloxy, optionally substituted thioalkoxy, optionally substituted alkoxyalkoxy, or optionally substituted amino;

[0063] each Y⁵ is, independently, O, S, Se, optionally substituted alkylene (e.g., methylene), or optionally substituted heteroalkylene;

[0064] n is an integer from 1 to 100,000; and

[0065] wherein the ring including U can include one or more double bonds.

[0066] In particular embodiments, the ring including U does not have a double bond between U—CB³R^{b3} or between CB³R^{b3}—C^{B2}R^{b2}.

[0067] In some embodiments, the modified nucleic acid or mRNA includes n number of linked nucleosides having Formula (Id):

[chemical structure]

or a pharmaceutically acceptable salt or stereoisomer thereof, wherein

[0068] U is O, S, N(R^{U})ₙᵤ, or C(R^{U})ₙᵤ, wherein nu is an integer from 0 to 2 and each R^{U} is, independently, H, halo, or optionally substituted alkyl;

[0069] each R³ is, independently, H, halo, hydroxy, thiol, optionally substituted alkyl, optionally substituted alkoxy, optionally substituted alkenyloxy, optionally substituted alkynyloxy, optionally substituted aminoalkoxy, optionally substituted alkoxyalkoxy, optionally substituted hydroxyalkoxy, optionally substituted amino, azido, optionally substituted aryl, optionally substituted aminoalkyl, optionally substituted aminoalkenyl, or optionally substituted aminoalkynyl;

[0070] each of Y¹, Y², and Y³, is, independently, O, S, Se, —NR^{N1}—, optionally substituted alkylene, or optionally substituted heteroalkylene, wherein R^{N1} is H, optionally substituted alkyl, optionally substituted alkenyl, optionally substituted alkynyl, or optionally substituted aryl;

[0071] each Y⁴ is, independently, H, hydroxy, thiol, boranyl, optionally substituted alkyl, optionally substituted alkenyl, optionally substituted alkynyl, optionally substituted alkoxy, optionally substituted alkenyloxy, optionally substituted alkynyloxy, optionally substituted thioalkoxy, optionally substituted alkoxyalkoxy, or optionally substituted amino;

[0072] each Y⁵ is, independently, O, S, optionally substituted alkylene (e.g., methylene), or optionally substituted heteroalkylene;

[0073] n is an integer from 1 to 100,000; and

[0074] B is a nucleobase (e.g., a purine, a pyrimidine, or derivatives thereof).

[0075] In some embodiments, the modified nucleic acid molecules or modified mRNA includes n number of linked nucleosides having Formula (Ie):

[chemical structure]

or a pharmaceutically acceptable salt or stereoisomer thereof, wherein

[0076] each of U′ and U″ is, independently, O, S, N(R^{U})ₙᵤ, or C(R^{U})ₙᵤ, wherein nu is an integer from 0 to 2 and each R^{U} is, independently, H, halo, or optionally substituted alkyl;

[0077] each R⁶ is, independently, H, halo, hydroxy, thiol, optionally substituted alkyl, optionally substituted alkoxy, optionally substituted alkenyloxy, optionally substituted alkynyloxy, optionally substituted aminoalkoxy, optionally substituted alkoxyalkoxy, optionally substituted hydroxyalkoxy, optionally substituted amino, azido, optionally substituted aryl, optionally substituted aminoalkyl, optionally substituted aminoalkenyl, or optionally substituted aminoalkynyl;

[0078] each Y^{5′} is, independently, O, S, optionally substituted alkylene (e.g., methylene or ethylene), or optionally substituted heteroalkylene;

[0079] n is an integer from 1 to 100,000; and

[0080] B is a nucleobase (e.g., a purine, a pyrimidine, or derivatives thereof).

[0081] In some embodiments, the modified nucleic acid or mRNA includes n number of linked nucleosides having Formula (If) or (If-1):

[chemical structure]

or a pharmaceutically acceptable salt or stereoisomer thereof, wherein

[0082] each of U′ and U″ is, independently, O, S, N, N(R^{U})ₙᵤ, or C(R^{U})ₙᵤ, wherein nu is an integer from 0 to 2 and each R^{U} is, independently, H, halo, or optionally substituted alkyl (e.g., U′ is O and U″ is N);

[0083] - - - is a single bond or absent;

[0084] each of R^{1′}, R^{2′}, R^{1″}, R^{2″}, R³, and R⁴ is, independently, H, halo, hydroxy, thiol, optionally substituted alkyl, optionally substituted alkoxy, optionally substituted alkenyloxy, optionally substituted alkynyloxy, optionally substituted aminoalkoxy, optionally substituted alkoxyalkoxy, optionally substituted hydroxyalkoxy, optionally substituted amino, azido, optionally substituted aryl, optionally substituted aminoalkyl, optionally substituted aminoalkenyl, optionally substituted aminoalkynyl, or absent; and wherein the combination of R^{1′} and R³, the combination of R^{1″} and R³, the combination of R^{2′} and R³, or the combination of R^{2″} and R³ can be taken together to form optionally substituted alkylene or optionally substituted heteroalkylene (e.g., to produce a locked nucleic acid); each of m′ and m″ is, independently, an integer from 0 to 3 (e.g., from 0 to 2, from 0 to 1, from 1 to 3, or from 1 to 2);

[0085] each of Y¹, Y², and Y³, is, independently, O, S, Se, —NR^{N1}—, optionally substituted alkylene, or optionally substituted heteroalkylene, wherein R^{N1} is H, optionally substituted alkyl, optionally substituted alkenyl, optionally substituted alkynyl, optionally substituted aryl, or absent;

[0086] each Y⁴ is, independently, H, hydroxy, thiol, boranyl, optionally substituted alkyl, optionally substituted alkenyl, optionally substituted alkynyl, optionally substituted alkoxy, optionally substituted alkenyloxy, optionally substituted alkynyloxy, optionally substituted thioalkoxy, optionally substituted alkoxyalkoxy, or optionally substituted amino;

[0087] each Y⁵ is, independently, O, S, Se, optionally substituted alkylene (e.g., methylene), or optionally substituted heteroalkylene;

[0088] n is an integer from 1 to 100,000; and

[0089] B is a nucleobase (e.g., a purine, a pyrimidine, or derivatives thereof).

[0090] In some embodiments of the modified nucleic acid or mRNA (e.g., (Ia)-(Ia-5), (Ib)-(If-1), (IIa)-(IIp), (IIb-1), (IIb-2), (IIc-1)-(IIc-2), (IIn-1), (IIn-2), (IVa)-(IV1), and (IXa)-(IXr)), the ring including U has one or two double bonds.

[0091] In some embodiments of the modified nucleic acid or mRNA (e.g., Formulas (Ia)-Ia-5), (Ib)-(If-1), (IIa)-(IIp), (IIb-1), (IIb-2), (IIc-1)-(IIc-2), (IIn-1), (IIn-2), (IVa)-(IV1), and (IXa)-(IXr)), each of R¹, R^{1′}, and R^{1″}, if present, is H. In further embodiments, each of R², R^{2′}, and R^{2″}, if present, is, independently, H, halo (e.g., fluoro), hydroxy, optionally substituted alkoxy (e.g., methoxy or ethoxy), or optionally substituted alkoxyalkoxy. In particular embodiments, alkoxyalkoxy is —(CH₂)ₛ₂(OCH₂CH₂)ₛ₁(CH₂)ₛ₃OR′, wherein s1 is an integer from 1 to 10 (e.g., from 1 to 6 or from 1 to 4), each of s2 and s3, independently, is an integer from 0 to 10 (e.g., from 0 to 4, from 0 to 6, from 1 to 4, from 1 to 6, or from 1 to 10), and R′ is H or C₁₋₂₀ alkyl). In some embodiments, s2 is 0, s1 is 1 or 2, s3 is 0 or 1, and R′ is C₁₋₆ alkyl.

[0092] In some embodiments of the modified nucleic acid or mRNA (e.g., Formulas (Ia)-Ia-5), (Ib)-(If-1), (IIa)-(IIp), (IIb-1), (IIb-2), (IIc-1)-(IIc-2), (IIn-1), (IIn-2), (IVa)-(IV1), and (IXa)-(IXr)), each of R², R^{2′}, and R^{2″}, if present, is H. In further embodiments, each of R¹, R^{1′}, and R^{1″}, if present, is, independently, H, halo (e.g., fluoro), hydroxy, optionally substituted alkoxy (e.g., methoxy or ethoxy), or optionally substituted alkoxyalkoxy. In particular embodiments, alkoxyalkoxy is —(CH₂)ₛ₂(OCH₂CH₂)ₛ₁(CH₂)ₛ₃OR′, wherein s1 is an integer from 1 to 10 (e.g., from 1 to 6 or from 1 to 4), each of s2 and s3, independently, is an integer from 0 to 10 (e.g., from 0 to 4, from 0 to 6, from 1 to 4, from 1 to 6, or from 1 to 10), and R′ is H or C₁₋₂₀ alkyl). In some embodiments, s2 is 0, s1 is 1 or 2, s3 is 0 or 1, and R′ is C₁₋₆ alkyl.

[0093] In some embodiments of the modified nucleic acids or mRNA (e.g., Formulas (Ia)-Ia-5), (Ib)-(If-1), (IIa)-(IIp), (IIb-1), (IIb-2), (IIc-1)-(IIc-2), (IIn-1), (IIn-2), (IVa)-(IV1), and (IXa)-(IXr)), each of R³, R⁴, and R⁵ is, independently, H, halo (e.g., fluoro), hydroxy, optionally substituted alkyl, optionally substituted alkoxy (e.g., methoxy or ethoxy), or optionally substituted alkoxyalkoxy. In particular embodiments, R³ is H, R⁴ is H, R⁵ is H, or R³, R⁴, and R⁵ are all H. In particular embodiments, R³ is C₁₋₆ alkyl, R⁴ is C₁₋₆ alkyl, R⁵ is C₁₋₆ alkyl, or R³, R⁴, and R⁵ are all C₁₋₆ alkyl. In particular embodiments, R³ and R⁴ are both H, and R⁵ is C₁₋₆ alkyl.

[0094] In some embodiments of the modified nucleic acids or mRNA (e.g., Formulas (Ia)-Ia-5), (Ib)-(If-1), (IIa)-(IIp), (IIb-1), (IIb-2), (IIc-1)-(IIc-2), (IIn-1), (IIn-2), (IVa)-(IV1), and (IXa)-(IXr)), R³ and R⁵ join together to form optionally substituted alkylene or optionally substituted heteroalkylene and, taken together with the carbons to which they are attached, provide an optionally substituted heterocyclyl (e.g., a bicyclic, tricyclic, or tetracyclic heterocyclyl, such as trans-3′,4′ analogs, wherein R³ and R⁵ join together to form heteroalkylene (e.g., —(CH₂)_{b1}—O—(CH₂)_{b2}O(CH₂)_{b3}—, wherein each of b1, b2, and b3 are, independently, an integer from 0 to 3).

[0095] In some embodiments of the modified nucleic acids or mRNA (e.g., Formulas (Ia)-Ia-5), (Ib)-(If-1), (IIa)-(IIp), (IIb-1), (IIb-2), (IIc-1)-(IIc-2), (IIn-1), (IIn-2), (IVa)-(IV1), and (IXa)-(IXr)), R³ and one or more of R^{1′}, R^{1″}, R^{2′}, R^{2″}, or R⁵ join together to form optionally substituted alkylene or optionally substituted heteroalkylene and, taken together with the carbons to which they are attached, provide an optionally substituted heterocyclyl (e.g., a bicyclic, tricyclic, or tetracyclic heterocyclyl, R³ and one or more of R^{1′}, R^{1″}, R^{2′}, R^{2″}, or R⁵ join together to form heteroalkylene (e.g., —(CH₂)_{b1}—O—(CH₂)_{b2}O(CH₂)_{b3}—, wherein each of b1, b2, and b3 are, independently, an integer from 0 to 3).

[0096] In some embodiments of the modified nucleic acids or mRNA (e.g., Formulas (Ia)-Ia-5), (Ib)-(If-1), (IIa)-(IIp), (IIb-1), (IIb-2), (IIc-1)-(IIc-2), (IIn-1), (IIn-2), (IVa)-(IV1), and (IXa)-(IXr)), R⁵ and one or more of R^{1′}, R^{1″}, R^{2′}, or R^{2″} join together to form optionally substituted alkylene or optionally substituted heteroalkylene and, taken together with the carbons to which they are attached, provide an optionally substituted heterocyclyl (e.g., a bicyclic, tricyclic, or tetracyclic heterocyclyl, R⁵ and one or more of R^{1′}, R^{1″}, R^{2′}, or R^{2″} join together to form heteroalkylene (e.g., —(CH₂)_{b1}O(CH₂)_{b2}—O—(CH₂)_{b3}—, wherein each of b1, b2, and b3 are, independently, an integer from 0 to 3).

[0097] In some embodiments of the modified nucleic acids or mRNA (e.g., Formulas (Ia)-Ia-5), (Ib)-(If-1), (IIa)-(IIp), (IIb-1), (IIb-2), (IIc-1)-(IIc-2), (IIn-1), (IIn-2), (IVa)-(IV1), and (IXa)-(IXr)), each Y² is, independently, O, S, or —NR^{N1}—, wherein R^{N1} is H, optionally substituted alkyl, optionally substituted alkenyl, optionally substituted alkynyl, or optionally substituted aryl. In particular embodiments, Y² is NR^{N1}—, wherein R^{N1} is H or optionally substituted alkyl (e.g., C₁₋₆ alkyl, such as methyl, ethyl, isopropyl, or n-propyl).

[0098] In some embodiments of the modified nucleic acids or mRNA (e.g., Formulas (Ia)-Ia-5), (Ib)-(If-1), (IIa)-(IIp), (IIb-1), (IIb-2), (IIc-1)-(IIc-2), (IIn-1), (IIn-2), (IVa)-(IV1), and (IXa)-(IXr)), each Y³ is, independently, O or S.

[0099] In some embodiments of the modified nucleic acids or mRNA (e.g., Formulas (Ia)-Ia-5), (Ib)-(If-1), (IIa)-(IIp), (IIb-1), (IIb-2), (IIc-1)-(IIc-2), (IIn-1), (IIn-2), (IVa)-(IV1), and (IXa)-(IXr)), R¹ is H; each R² is, independently, H, halo (e.g., fluoro), hydroxy, optionally substituted alkoxy (e.g., methoxy or ethoxy), or optionally substituted alkoxyalkoxy (e.g., —(CH₂)ₛ₂(OCH₂CH₂)ₛ₁(CH₂)ₛ₃OR′, wherein s1 is an integer from 1 to 10 (e.g., from 1 to 6 or from 1 to 4), each of s2 and s3, independently, is an integer from 0 to 10 (e.g., from 0 to 4, from 0 to 6, from 1 to 4, from 1 to 6, or from 1 to 10), and R′ is H or C₁₋₂₀ alkyl, such as wherein s2 is 0, s1 is 1 or 2, s3 is 0 or 1, and R′ is C₁₋₆ alkyl); each Y² is, independently, 0 or —NR^{N1}—, wherein R^{N1} is H, optionally substituted alkyl, optionally substituted alkenyl, optionally substituted alkynyl, or optionally substituted aryl (e.g., wherein R^{N1} is H or optionally substituted alkyl (e.g., C₁₋₆ alkyl, such as methyl, ethyl, isopropyl, or n-propyl)); and each Y³ is, independently, O or S (e.g., S). In further embodiments, R³ is H, halo (e.g., fluoro), hydroxy, optionally substituted alkyl, optionally substituted alkoxy (e.g., methoxy or ethoxy), or optionally substituted alkoxyalkoxy. In yet further embodiments, each Y¹ is, independently, 0 or —NR^{N1}—, wherein R^{N1} is H, optionally substituted alkyl, optionally substituted alkenyl, optionally substituted alkynyl, or optionally substituted aryl (e.g., wherein R^{N1} is H or optionally substituted alkyl (e.g., C₁₋₆ alkyl, such as methyl, ethyl, isopropyl, or n-propyl)); and each Y⁴ is, independently, H, hydroxy, thiol, optionally substituted alkyl, optionally substituted alkoxy, optionally substituted thioalkoxy, optionally substituted alkoxyalkoxy, or optionally substituted amino.

[0100] In some embodiments of the modified nucleic acids or mRNA (e.g., Formulas (Ia)-(Ia-5), (Ib)-(If-1), (IIa)-(IIp), (IIb-1), (IIb-2), (IIc-1)-(IIc-2), (IIn-1), (IIn-2), (IVa)-(IV1), and (IXa)-(IXr)), each R¹ is, independently, H, halo (e.g., fluoro), hydroxy, optionally substituted alkoxy (e.g., methoxy or ethoxy), or optionally substituted alkoxyalkoxy (e.g., —(CH₂)ₛ₂(OCH₂CH₂)ₛ₁(CH₂)ₛ₃OR′, wherein s1 is an integer from 1 to 10 (e.g., from 1 to 6 or from 1 to 4), each of s2 and s3, independently, is an integer from 0 to 10 (e.g., from 0 to 4, from 0 to 6, from 1 to 4, from 1 to 6, or from 1 to 10), and R′ is H or C₁₋₂₀ alkyl, such as wherein s2 is 0, s1 is 1 or 2, s3 is 0 or 1, and R′ is C₁₋₆ alkyl); R² is H; each Y² is, independently, 0 or —NR^{N1}—, wherein R^{N1} is H, optionally substituted alkyl, optionally substituted alkenyl, optionally substituted alkynyl, or optionally substituted aryl (e.g., wherein R^{N1} is H or optionally substituted alkyl (e.g., C₁₋₆ alkyl, such as methyl, ethyl, isopropyl, or n-propyl)); and each Y³ is, independently, O or S (e.g., S). In further embodiments, R³ is H, halo (e.g., fluoro), hydroxy, optionally substituted alkyl, optionally substituted alkoxy (e.g., methoxy or ethoxy), or optionally substituted alkoxyalkoxy. In yet further embodiments, each Y¹ is, independently, 0 or —NR^{N1}—, wherein R^{N1} is H, optionally substituted alkyl, optionally substituted alkenyl, optionally substituted alkynyl, or optionally substituted aryl (e.g., wherein R^{N1} is H or optionally substituted alkyl (e.g., C₁₋₆ alkyl, such as methyl, ethyl, isopropyl, or n-propyl)); and each Y⁴ is, independently, H, hydroxy, thiol, optionally substituted alkyl, optionally substituted alkoxy, optionally substituted thioalkoxy, optionally substituted alkoxyalkoxy, or optionally substituted amino.

[0101] In some embodiments of the modified nucleic acids or mRNA (e.g., Formulas (Ia)-(Ia-5), (Ib)-(If-1), (IIa)-(IIp), (IIb-1), (IIb-2), (IIc-1)-(IIc-2), (IIn-1), (IIn-2), (IVa)-(IV1), and (IXa)-(IXr)), the ring including U is in the β-D (e.g., (3-D-ribo) configuration.

[0102] In some embodiments of the modified nucleic acids or mRNA (e.g Formulas (Ia)-(Ia-5), (Ib)-(If-1), (IIa)-(IIp), (IIb-1), (IIb-2), (IIc-1)-(IIc-2), (IIn-1), (IIn-2), (IVa)-(IV1), and (IXa)-(IXr)), the ring including U is in the α-L (e.g., α-L-ribo) configuration.

[0103] In some embodiments of the modified nucleic acids or mRNA (e.g., Formulas (Ia)-(Ia-5), (Ib)-(If-1), (IIa)-(IIp), (IIb-1), (IIb-2), (IIc-1)-(IIc-2), (IIn-1), (IIn-2), (IVa)-(IV1), and (IXa)-(IXr)), one or more B is not pseudouridine (ψ) or 5-methyl-cytidine (m⁵C). In some embodiments, about 10% to about 100% of B nucleobases is not ψ or m⁵C (e.g., from 10% to 20%, from 10% to 35%, from 10% to 50%, from 10% to 60%, from 10% to 75%, from 10% to 90%, from 10% to 95%, from 10% to 98%, from 10% to 99%, from 20% to 35%, from 20% to 50%, from 20% to 60%, from 20% to 75%, from 20% to 90%, from 20% to 95%, from 20% to 98%, from 20% to 99%, from 20% to 100%, from 50% to 60%, from 50% to 75%, from 50% to 90%, from 50% to 95%, from 50% to 98%, from 50% to 99%, from 50% to 100%, from 75% to 90%, from 75% to 95%, from 75% to 98%, from 75% to 99%, and from 75% to 100% of n number of B is not ψ or m⁵C). In some embodiments, B is not ψ or m⁵C.

[0104] In some embodiments of the modified nucleic acids or mRNA (e.g., Formulas (Ia)-(Ia-5), (Ib)-(If-1), (IIa)-(IIp), (IIb-1), (IIb-2), (IIc-1)-(IIc-2), (IIn-1), (IIn-2), (IVa)-(IV1), and (IXa)-(IXr)), when B is an unmodified nucleobase selected from cytosine, guanine, uracil and adenine, then at least one of Y¹, Y², or Y³ is not O.

[0105] In some embodiments, the modified nucleic acids or mRNA includes a modified ribose. In some embodiments, modified nucleic acids or mRNA includes n number of linked nucleosides having Formula (IIa)-(IIc):

[chemical structure]

or a pharmaceutically acceptable salt or stereoisomer thereof. In particular embodiments, U is O or C(R^{U})ₙᵤ, wherein nu is an integer from 0 to 2 and each R^{U} is, independently, H, halo, or optionally substituted alkyl (e.g., U is —CH₂— or —CH—). In other embodiments, each of R¹, R², R³, R⁴, and R⁵ is, independently, H, halo, hydroxy, thiol, optionally substituted alkyl, optionally substituted alkoxy, optionally substituted alkenyloxy, optionally substituted alkynyloxy, optionally substituted aminoalkoxy, optionally substituted alkoxyalkoxy, optionally substituted hydroxyalkoxy, optionally substituted amino, azido, optionally substituted aryl, optionally substituted aminoalkyl, optionally substituted aminoalkenyl, optionally substituted aminoalkynyl, or absent (e.g., each R¹ and R² is, independently, H, halo, hydroxy, optionally substituted alkyl, or optionally substituted alkoxy; each R³ and R⁴ is, independently, H or optionally substituted alkyl; and R⁵ is H or hydroxy), and - - - is a single bond or double bond.

[0106] In particular embodiments, the modified nucleic acid or mRNA includes n number of linked nucleosides having Formula (IIb-1)-(IIb-2):

[chemical structure]

or a pharmaceutically acceptable salt or stereoisomer thereof. In some embodiments, U is O or C(R^{U})ₙᵤ, wherein nu is an integer from 0 to 2 and each R^{U} is, independently, H, halo, or optionally substituted alkyl (e.g., U is —CH₂— or —CH—). In other embodiments, each of R¹ and R² is, independently, H, halo, hydroxy, thiol, optionally substituted alkyl, optionally substituted alkoxy, optionally substituted alkenyloxy, optionally substituted alkynyloxy, optionally substituted aminoalkoxy, optionally substituted alkoxyalkoxy, optionally substituted hydroxyalkoxy, optionally substituted amino, azido, optionally substituted aryl, optionally substituted aminoalkyl, optionally substituted aminoalkenyl, optionally substituted aminoalkynyl, or absent (e.g., each R¹ and R² is, independently, H, halo, hydroxy, optionally substituted alkyl, or optionally substituted alkoxy, e.g., H, halo, hydroxy, alkyl, or alkoxy). In particular embodiments, R² is hydroxy or optionally substituted alkoxy (e.g., methoxy, ethoxy, or any described herein).

[0107] In particular embodiments, the modified nucleic acid or mRNA includes n number of linked nucleosides having Formula (IIc-1)-(IIc-4):

[chemical structure]

or a pharmaceutically acceptable salt or stereoisomer thereof. In some embodiments, U is O or C(R^{U})ₙᵤ, wherein nu is an integer from 0 to 2 and each R^{U} is, independently, H, halo, or optionally substituted alkyl (e.g., U is —CH₂— or —CH—). In some embodiments, each of R¹, R², and R³ is, independently, H, halo, hydroxy, thiol, optionally substituted alkyl, optionally substituted alkoxy, optionally substituted alkenyloxy, optionally substituted alkynyloxy, optionally substituted aminoalkoxy, optionally substituted alkoxyalkoxy, optionally substituted hydroxyalkoxy, optionally substituted amino, azido, optionally substituted aryl, optionally substituted aminoalkyl, optionally substituted aminoalkenyl, optionally substituted aminoalkynyl, or absent (e.g., each R¹ and R² is, independently, H, halo, hydroxy, optionally substituted alkyl, or optionally substituted alkoxy, e.g., H, halo, hydroxy, alkyl, or alkoxy; and each R³ is, independently, H or optionally substituted alkyl)). In particular embodiments, R² is optionally substituted alkoxy (e.g., methoxy or ethoxy, or any described herein). In particular embodiments, R¹ is optionally substituted alkyl, and R² is hydroxy. In other embodiments, R¹ is hydroxy, and R² is optionally substituted alkyl. In further embodiments, R³ is optionally substituted alkyl.

[0108] In some embodiments, the modified nucleic acids or mRNA includes an acyclic modified ribose. In some embodiments, the modified nucleic acids or mRNA includes n number of linked nucleosides having Formula (IId)-(IIf):

[chemical structure]

or a pharmaceutically acceptable salt or stereoisomer thereof

[0109] In some embodiments, the modified nucleic acids or mRNA includes an acyclic modified hexitol. In some embodiments, the modified nucleic acids or mRNA includes n number of linked nucleosides having Formula (IIg)-(IIj):

[chemical structure]

or a pharmaceutically acceptable salt or stereoisomer thereof

[0110] In some embodiments, the modified nucleic acids or mRNA includes a sugar moiety having a contracted or an expanded ribose ring. In some embodiments, the modified nucleic acids or mRNA includes n number of linked nucleosides having Formula (IIk)-(IIm):

[chemical structure]

or a pharmaceutically acceptable salt or stereoisomer thereof, wherein each of R^{1′} and R^{2″} is, independently, H, halo, hydroxy, optionally substituted alkyl, optionally substituted alkoxy, optionally substituted alkenyloxy, optionally substituted alkynyloxy, optionally substituted aminoalkoxy, optionally substituted alkoxyalkoxy, or absent; and wherein the combination of R^{2′} and R³ or the combination of R^{2″} and R³ can be taken together to form optionally substituted alkylene or optionally substituted heteroalkylene.

[0111] In some embodiments, the modified nucleic acids or mRNA includes a locked modified ribose. In some embodiments, the modified nucleic acids or mRNA includes n number of linked nucleosides having Formula (IIn):

[chemical structure]

or a pharmaceutically acceptable salt or stereoisomer thereof, wherein R^{3′} is O, S, or —NR^{N1}—, wherein R^{N1} is H, optionally substituted alkyl, optionally substituted alkenyl, optionally substituted alkynyl, or optionally substituted aryl and R^{3″} is optionally substituted alkylene (e.g., —CH₂—, —CH₂CH₂—, or —CH₂CH₂CH₂—) or optionally substituted heteroalkylene (e.g., —CH₂NH—, —CH₂CH₂NH—, —CH₂OCH₂—, or —CH₂CH₂OCH₂—)(e.g., R^{3′} is O and R^{3″} is optionally substituted alkylene (e.g., —CH₂—, —CH₂CH₂—, or —CH₂CH₂CH₂—)).

[0112] In some embodiments, the modified nucleic acid or mRNA includes n number of linked nucleosides having Formula (IIn-1)-(II-n2):

[chemical structure]

or a pharmaceutically acceptable salt or stereoisomer thereof, wherein R^{3′} is O, S, or —NR^{N1}—, wherein R^{N1} is H, optionally substituted alkyl, optionally substituted alkenyl, optionally substituted alkynyl, or optionally substituted aryl and R^{3″} is optionally substituted alkylene (e.g., —CH₂—, —CH₂CH₂—, or —CH₂CH₂CH₂—) or optionally substituted heteroalkylene (e.g., —CH₂NH—, —CH₂CH₂NH—, —CH₂OCH₂—, or —CH₂CH₂OCH₂—) (e.g., R^{3′} is O and R^{3″} is optionally substituted alkylene (e.g., —CH₂—, —CH₂CH₂—, or —CH₂CH₂CH₂—)).

[0113] In some embodiments, the modified nucleic acids or mRNA includes a locked modified ribose that forms a tetracyclic heterocyclyl. In some embodiments, the modified nucleic acids or mRNA includes n number of linked nucleosides having Formula (IIo):

[chemical structure]

or a pharmaceutically acceptable salt or stereoisomer thereof, wherein R^{12a}, R^{12c}, T^{1′}, T^{1″}, T^{2′}, T^{2″}, V¹, and V³ are as described herein.

[0114] Any of the formulas for the modified nucleic acids or mRNA can include one or more nucleobases described herein (e.g., Formulas (b1)-(b43)).

[0115] In one embodiment, the present invention provides methods of preparing a modified nucleic acids or mRNA comprising at least one nucleotide (e.g., mRNA molecule), wherein the modified nucleic acid comprises n number of nucleosides having Formula (Ia), as defined herein:

[chemical structure]

the method comprising reacting a compound of Formula (IIIa), as defined herein:

[chemical structure]

with an RNA polymerase, and a cDNA template.

[0116] In a further embodiment, the present invention provides methods of amplifying a modified nucleic acids or mRNA comprising at least one nucleotide (e.g., mRNA molecule), the method comprising: reacting a compound of Formula (IIIa), as defined herein, with a primer, a cDNA template, and an RNA polymerase.

[0117] In one embodiment, the present invention provides methods of preparing a modified nucleic acids or mRNA comprising at least one nucleotide (e.g., mRNA molecule), wherein the modified nucleic acid comprises n number of nucleosides having Formula (Ia-1), as defined herein:

[chemical structure]

the method comprising reacting a compound of Formula (IIIa-1), as defined herein:

[chemical structure]

with an RNA polymerase, and a cDNA template.

[0118] In a further embodiment, the present invention provides methods of amplifying a modified nucleic acids or mRNA comprising at least one nucleotide (e.g., mRNA molecule), the method comprising reacting a compound of Formula (IIIa-1), as defined herein, with a primer, a cDNA template, and an RNA polymerase.

[0119] In one embodiment, the present invention provides methods of preparing a modified mRNA comprising at least one nucleotide (e.g., mRNA molecule), wherein the polynucleotide comprises n number of nucleosides having Formula (Ia-2), as defined herein:

[chemical structure]

[0120] the method comprising reacting a compound of Formula (IIIa-2), as defined herein:

[chemical structure]

with an RNA polymerase, and a cDNA template.

[0121] In a further embodiment, the present invention provides methods of amplifying a modified mRNA comprising at least one nucleotide (e.g., mRNA molecule), the method comprising:

[0122] reacting a compound of Formula (IIIa-2), as defined herein, with a primer, a cDNA template, and an RNA polymerase.

[0123] In some embodiments, the reaction may be repeated from 1 to about 7,000 times. In any of the embodiments herein, B may be a nucleobase of Formula (b1)-(b43).

[0124] The modified nucleic acids and mRNA can optionally include 5′ and/or 3′ flanking regions, which are described herein.

Modified RNA (e.g. mRNA) Molecules

[0125] The present invention also includes building blocks, e.g., modified ribonucleosides, modified ribonucleotides, of modified RNA (mRNA) molecules. For example, these mRNA can be useful for preparing the modified nucleic acids or mRNA of the invention.

[0126] In some embodiments, the building block molecule has Formula (IIIa) or (IIIa-1):

[chemical structure]

or a pharmaceutically acceptable salt or stereoisomer thereof, wherein the substituents are as described herein (e.g., for Formula (Ia) and (Ia-1)), and wherein when B is an unmodified nucleobase selected from cytosine, guanine, uracil and adenine, then at least one of Y¹, Y², or Y³ is not 0.

[0127] In some embodiments, the building block molecule, which may be incorporated into a modified nucleic acid or mRNA, has Formula (IVa)-(IVb):

[chemical structure]

or a pharmaceutically acceptable salt or stereoisomer thereof, wherein B is as described herein (e.g., any one of (b1)-(b43)). In particular embodiments, Formula (IVa) or (IVb) is combined with a modified uracil (e.g., any one of formulas (b1)-(b9), (b21)-(b23), and (b28)-(b31), such as formula (b1), (b8), (b28), (b29), or (b30)). In particular embodiments, Formula (IVa) or (IVb) is combined with a modified cytosine (e.g., any one of formulas (b10)-(b14), (b24), (b25), and (b32)-(b36), such as formula (b10) or (b32)). In particular embodiments, Formula (IVa) or (IVb) is combined with a modified guanine (e.g., any one of formulas (b15)-(b17) and (b37)-(b40)). In particular embodiments, Formula (IVa) or (IVb) is combined with a modified adenine (e.g., any one of formulas (b18)-(b20) and (b41)-(b43)).

[0128] In some embodiments, the building block molecule, which may be incorporated into a modified nucleic acid molecule or mRNA, has Formula (IVc)-(IVk):

[chemical structure]

[chemical structure]

or a pharmaceutically acceptable salt or stereoisomer thereof, wherein B is as described herein (e.g., any one of (b1)-(b43)). In particular embodiments, one of Formulas (IVc)-(IVk) is combined with a modified uracil (e.g., any one of formulas (b1)-(b9), (b21)-(b23), and (b28)-(b31), such as formula (b1), (b8), (b28), (b29), or (b30)). In particular embodiments, one of Formulas (IVc)-(IVk) is combined with a modified cytosine (e.g., any one of formulas (b10)-(b14), (b24), (b25), and (b32)-(b36), such as formula (b10) or (b32)). In particular embodiments, one of Formulas (IVc)-(IVk) is combined with a modified guanine (e.g., any one of formulas (b15)-(b17) and (b37)-(b40)). In particular embodiments, one of Formulas (IVc)-(IVk) is combined with a modified adenine (e.g., any one of formulas (b18)-(b20) and (b41)-(b43)).

[0129] In other embodiments, the building block molecule, which may be incorporated into a modified nucleic acid molecule or mRNA, has Formula (Va) or (Vb):

[chemical structure]

or a pharmaceutically acceptable salt or stereoisomer thereof, wherein B is as described herein (e.g., any one of (b1)-(b43)).

[0130] In other embodiments, the building block molecule, which may be incorporated into a modified nucleic acid molecule or mRNA, has Formula (IXa)-(IXd):

[chemical structure]

or a pharmaceutically acceptable salt or stereoisomer thereof, wherein B is as described herein (e.g., any one of (b1)-(b43)). In particular embodiments, one of Formulas (IXa)-(IXd) is combined with a modified uracil (e.g., any one of formulas (b1)-(b9), (b21)-(b23), and (b28)-(b31), such as formula (b1), (b8), (b28), (b29), or (b30)). In particular embodiments, one of Formulas (IXa)-(IXd) is combined with a modified cytosine (e.g., any one of formulas (b10)-(b14), (b24), (b25), and (b32)-(b36), such as formula (b10) or (b32)). In particular embodiments, one of Formulas (IXa)-(IXd) is combined with a modified guanine (e.g., any one of formulas (b15)-(b17) and (b37)-(b40)). In particular embodiments, one of Formulas (IXa)-(IXd) is combined with a modified adenine (e.g., any one of formulas (b18)-(b20) and (b41)-(b43)).

[0131] In other embodiments, the building block molecule, which may be incorporated into a modified nucleic acid molecule or mRNA, has Formula (IXe)-(IXg):

[chemical structure]

(IXg), or a pharmaceutically acceptable salt or stereoisomer thereof, wherein B is as described herein (e.g., any one of (b1)-(b43)). In particular embodiments, one of Formulas (IXe)-(IXg) is combined with a modified uracil (e.g., any one of formulas (b1)-(b9), (b21)-(b23), and (b28)-(b31), such as formula (b1)), (b8), (b28), (b29), or (b30)). In particular embodiments, one of Formulas (IXe)-(IXg) is combined with a modified cytosine (e.g., any one of formulas (b10)-(b14), (b24), (b25), and (b32)-(b36), such as formula (b10) or (b32)). In particular embodiments, one of Formulas (IXe)-(IXg) is combined with a modified guanine (e.g., any one of formulas (b15)-(b17) and (b37)-(b40)). In particular embodiments, one of Formulas (IXe)-(IXg) is combined with a modified adenine (e.g., any one of formulas (b18)-(b20) and (b41)-(b43)).

[0132] In other embodiments, the building block molecule, which may be incorporated into a modified nucleic acid molecule or mRNA, has Formula (IXh)-(IXk):

[chemical structure]

or a pharmaceutically acceptable salt or stereoisomer thereof, wherein B is as described herein (e.g., any one of (b1)-(b43)). In particular embodiments, one of Formulas (IXh)-(IXk) is combined with a modified uracil (e.g., any one of formulas (b1)-(b9), (b21)-(b23), and (b28)-(b31), such as formula (b1), (b8), (b28), (b29), or (b30)). In particular embodiments, one of Formulas (IXh)-(IXk) is combined with a modified cytosine (e.g., any one of formulas (b10)-(b14), (b24), (b25), and (b32)-(b36), such as formula (b10) or (b32)). In particular embodiments, one of Formulas (IXh)-(IXk) is combined with a modified guanine (e.g., any one of formulas (b15)-(b17) and (b37)-(b40)). In particular embodiments, one of Formulas (IXh)-(IXk) is combined with a modified adenine (e.g., any one of formulas (b18)-(b20) and (b41)-(b43)).

[0133] In other embodiments, the building block molecule, which may be incorporated into a modified nucleic acid molecule or mRNA, has Formula (IXl)-(IXr):

[chemical structure]

or a pharmaceutically acceptable salt or stereoisomer thereof, wherein each r1 and r2 is, independently, an integer from 0 to 5 (e.g., from 0 to 3, from 1 to 3, or from 1 to 5) and B is as described herein (e.g., any one of (b1)-(b43)). In particular embodiments, one of Formulas (IXl)-(IXr) is combined with a modified uracil (e.g., any one of formulas (b1)-(b9), (b21)-(b23), and (b28)-(b31), such as formula (b1), (b8), (b28), (b29), or (b30)). In particular embodiments, one of Formulas (IXl)-(IXr) is combined with a modified cytosine (e.g., any one of formulas (b10)-(b14), (b24), (b25), and (b32)-(b36), such as formula (b10) or (b32)). In particular embodiments, one of Formulas (IXl)-(IXr) is combined with a modified guanine (e.g., any one of formulas (b15)-(b17) and (b37)-(b40)). In particular embodiments, one of Formulas (IXl)-(IXr) is combined with a modified adenine (e.g., any one of formulas (b18)-(b20) and (b41)-(b43)).

[0134] In some embodiments, the building block molecule, which may be incorporated into a modified nucleic acid molecules or mRNA, can be selected from the group consisting of:

[chemical structure]

[chemical structure]

or a pharmaceutically acceptable salt or stereoisomer thereof, wherein each r is, independently, an integer from 0 to 5 (e.g., from 0 to 3, from 1 to 3, or from 1 to 5).

[0135] In some embodiments, the building block molecule, which may be incorporated into a modified nucleic acid molecule or mRNA, can be selected from the group consisting of:

[chemical structure]

[chemical structure]

or a pharmaceutically acceptable salt or stereoisomer thereof, wherein each r is, independently, an integer from 0 to 5 (e.g., from 0 to 3, from 1 to 3, or from 1 to 5) and s1 is as described herein.

[0136] In some embodiments, the building block molecule, which may be incorporated into a nucleic acid (e.g., RNA, mRNA, or mRNA), is a modified uridine (e.g., selected from the group consisting of:

[chemical structure]

[chemical structure]

[chemical structure]

[chemical structure]

[chemical structure]

[chemical structure]

[chemical structure]

[chemical structure]

[chemical structure]

[chemical structure]

[chemical structure]

[chemical structure]

[chemical structure]

[chemical structure]

[chemical structure]

[chemical structure]

[chemical structure]

[chemical structure]

or a pharmaceutically acceptable salt or stereoisomer thereof, wherein Y¹, Y³, Y⁴, Y⁶, and r are as described herein (e.g., each r is, independently, an integer from 0 to 5, such as from 0 to 3, from 1 to 3, or from 1 to 5)).

[0137] In some embodiments, the building block molecule, which may be incorporated into a modified nucleic acid molecule or mRNA, is a modified cytidine (e.g., selected from the group consisting of:

[chemical structure]

[chemical structure]

[chemical structure]

[chemical structure]

[chemical structure]

[chemical structure]

[chemical structure]

or a pharmaceutically acceptable salt or stereoisomer thereof, wherein Y¹, Y³, Y⁴, Y⁶, and r are as described herein (e.g., each r is, independently, an integer from 0 to 5, such as from 0 to 3, from 1 to 3, or from 1 to 5)). For example, the building block molecule, which may be incorporated into a modified nucleic acid molecule or mRNA, can be:

[chemical structure]

or a pharmaceutically acceptable salt or stereoisomer thereof, wherein each r is, independently, an integer from 0 to 5 (e.g., from 0 to 3, from 1 to 3, or from 1 to 5).

[0138] In some embodiments, the building block molecule, which may be incorporated into a modified nucleic acid molecule or mRNA, is a modified adenosine (e.g., selected from the group consisting of:

[chemical structure]

[chemical structure]

[chemical structure]

[chemical structure]

[chemical structure]

[chemical structure]

[chemical structure]

or a pharmaceutically acceptable salt or stereoisomer thereof, wherein Y¹, Y³, Y⁴, Y⁶, and r are as described herein (e.g., each r is, independently, an integer from 0 to 5, such as from 0 to 3, from 1 to 3, or from 1 to 5)).

[0139] In some embodiments, the building block molecule, which may be incorporated into a modified nucleic acid molecule or mRNA, is a modified guanosine (e.g., selected from the group consisting of:

[chemical structure]

[chemical structure]

[chemical structure]

[chemical structure]

[chemical structure]

[chemical structure]

[chemical structure]

or a pharmaceutically acceptable salt or stereoisomer thereof, wherein Y¹, Y³, Y⁴, Y⁶, and r are as described herein (e.g., each r is, independently, an integer from 0 to 5, such as from 0 to 3, from 1 to 3, or from 1 to 5)).

[0140] In some embodiments, the chemical modification can include replacement of C group at C-5 of the ring (e.g., for a pyrimidine nucleoside, such as cytosine or uracil) with N (e.g., replacement of the >CH group at C-5 with >NR^{N1} group, wherein R^{N}1 is H or optionally substituted alkyl). For example, the mRNA molecule, which may be incorporated into a modified nucleic acid molecule or mRNA, can be:

[chemical structure]

or a pharmaceutically acceptable salt or stereoisomer thereof, wherein each r is, independently, an integer from 0 to 5 (e.g., from 0 to 3, from 1 to 3, or from 1 to 5).

[0141] In another embodiment, the chemical modification can include replacement of the hydrogen at C-5 of cytosine with halo (e.g., Br, Cl, F, or I) or optionally substituted alkyl (e.g., methyl). For example, the mRNA molecule, which may be incorporated into a modified nucleic acid or mRNA, can be:

[chemical structure]

or a pharmaceutically acceptable salt or stereoisomer thereof, wherein each r is, independently, an integer from 0 to 5 (e.g., from 0 to 3, from 1 to 3, or from 1 to 5).

[0142] In yet a further embodiment, the chemical modification can include a fused ring that is formed by the NH₂ at the C-4 position and the carbon atom at the C-5 position. For example, the building block molecule, which may be incorporated into a modified nucleic acid molecule or mRNA, can be:

[chemical structure]

or a pharmaceutically acceptable salt or stereoisomer thereof, wherein each r is, independently, an integer from 0 to 5 (e.g., from 0 to 3, from 1 to 3, or from 1 to 5).

### Modifications on the Sugar

[0143] The modified nucleosides and nucleotides, which may be incorporated into a nucleic acid (e.g., RNA or mRNA, as described herein) can be modified on the sugar of the ribonucleic acid. For example, the 2′ hydroxyl group (OH) can be modified or replaced with a number of different “oxy” or “deoxy” substituents. Exemplary substitutions at the 2′-position include, but are not limited to, H, halo, optionally substituted C₁₋₆ alkyl; optionally substituted C₁₋₆ alkoxy; optionally substituted C₆₋₁₀ aryloxy; optionally substituted C₃₋₈ cycloalkyl; optionally substituted C₃₋₈ cycloalkoxy; optionally substituted C₆₋₁₀ aryloxy; optionally substituted C₆₋₁₀ aryl-C₁₋₆ alkoxy, optionally substituted C₁₋₁₂ (heterocyclyl)oxy; a sugar (e.g., ribose, pentose, or any described herein); a polyethyleneglycol (PEG), —O(CH₂CH₂O)ₙCH₂CH₂OR, where R is H or optionally substituted alkyl, and n is an integer from 0 to 20 (e.g., from 0 to 4, from 0 to 8, from 0 to 10, from 0 to 16, from 1 to 4, from 1 to 8, from 1 to 10, from 1 to 16, from 1 to 20, from 2 to 4, from 2 to 8, from 2 to 10, from 2 to 16, from 2 to 20, from 4 to 8, from 4 to 10, from 4 to 16, and from 4 to 20); “locked” nucleic acids (LNA) in which the 2′-hydroxyl is connected by a C₁₋₆ alkylene or C₁₋₆ heteroalkylene bridge to the 4′-carbon of the same ribose sugar, where exemplary bridges included methylene, propylene, ether, or amino bridges; aminoalkyl, as defined herein; aminoalkoxy, as defined herein; amino as defined herein; and amino acid, as defined herein.

[0144] Generally, RNA includes the sugar group ribose, which is a 5-membered ring having an oxygen. Exemplary, non-limiting modified nucleotides include replacement of the oxygen in ribose (e.g., with S, Se, or alkylene, such as methylene or ethylene); addition of a double bond (e.g., to replace ribose with cyclopentenyl or cyclohexenyl); ring contraction of ribose (e.g., to form a 4-membered ring of cyclobutane or oxetane); ring expansion of ribose (e.g., to form a 6- or 7-membered ring having an additional carbon or heteroatom, such as for anhydrohexitol, altritol, mannitol, cyclohexanyl, cyclohexenyl, and morpholino that also has a phosphoramidate backbone); multicyclic forms (e.g., tricyclo; and “unlocked” forms, such as glycol nucleic acid (GNA) (e.g., R-GNA or S-GNA, where ribose is replaced by glycol units attached to phosphodiester bonds), threose nucleic acid (TNA, where ribose is replace with α-L-threofuranosyl-(3′→2′)), and peptide nucleic acid (PNA, where 2-amino-ethyl-glycine linkages replace the ribose and phosphodiester backbone). The sugar group can also contain one or more carbons that possess the opposite stereochemical configuration than that of the corresponding carbon in ribose. Thus, a modified nucleic acid molecule or mRNA can include nucleotides containing, e.g., arabinose, as the sugar.

### Modifications on the Phosphate Backbone

[0145] The modified nucleosides and nucleotides, which may be incorporated into a nucleic acid, e.g., RNA or mRNA, as described herein, can be modified on the phosphate backbone. The phosphate groups of the backbone can be modified by replacing one or more of the oxygen atoms with a different substituent. Further, the modified nucleosides and nucleotides can include the wholesale replacement of an unmodified phosphate moiety with a modified phosphate as described herein. Examples of modified phosphate groups include, but are not limited to, phosphorothioate, phosphoroselenates, borano phosphates, borano phosphate esters, hydrogen phosphonates phosphoroamidates, alkyl or aryl phosphonates and phosphotriesters. Phosphorodithioates have both non-linking oxygens replaced by sulfur. The phosphate linker can also be modified by the replacement of a linking oxygen with nitrogen (bridged phosphoroamidates), sulfur (bridged phosphorothioates) and carbon (bridged methylene-phosphonates).

### Modifications on the Nucleobase

[0146] The present disclosure provides for modified nucleosides and nucleotides. As described herein “nucleoside” is defined as a compound containing a five-carbon sugar molecule (a pentose or ribose) or derivative thereof, and an organic base, purine or pyrimidine, or a derivative thereof. As described herein, “nucleotide” is defined as a nucleoside consisting of a phosphate group. The modified nucleotides (e.g., modified mRNA) may by synthesized by any useful method, as described herein (e.g., chemically, enzymatically, or recombinantly to include one or more modified or non-natural nucleosides).

[0147] The modified nucleotide base pairing encompasses not only the standard adenosine-thymine, adenosine-uracil, or guanosine-cytosine base pairs, but also base pairs formed between nucleotides and/or modified nucleotides comprising non-standard or modified bases, wherein the arrangement of hydrogen bond donors and hydrogen bond acceptors permits hydrogen bonding between a non-standard base and a standard base or between two complementary non-standard base structures. One example of such non-standard base pairing is the base pairing between the modified nucleotide inosine and adenine, cytosine or uracil.

[0148] The modified nucleosides and nucleotides, which may be incorporated into a nucleic acid, e.g., RNA or mRNA, as described herein, can be modified on the nucleobase. Examples of nucleobases found in RNA include, but are not limited to, adenine, guanine, cytosine and uracil. Examples of nucleobases found in DNA include, but are not limited to, adenine, guanine, cytosine and thymine. These nucleobases can be modified or wholly replaced to provide nucleic acids having enhanced properties, e.g. resistance to nucleases through disruption of the binding of a major groove binding partner.

[0149] Table 1 below identifies the chemical faces of each canonical nucleotide. Circles identify the atoms comprising the respective chemical regions.

TABLE 1

| | | | | Watson-Crick |
|---|---|---|---|---|
| | | Major Groove | Minor Groove | Base-pairing |
| | | Face | Face | Face |
| Pyrim- idines | Cytidine: | [chemical structure] | [chemical structure] | [chemical structure] |
| | Uridine: | [chemical structure] | [chemical structure] | [chemical structure] |
| Pu- rines | Aden- osine: | [chemical structure] | [chemical structure] | [chemical structure] |
| | Guano- sine: | [chemical structure] | [chemical structure] | [chemical structure] |

[0150] In some embodiments, B is a modified uracil. Exemplary modified uracils include those having Formula (b1)-(b5):

[chemical structure]

[0151] or a pharmaceutically acceptable salt or stereoisomer thereof, wherein

[0152] [symbol] is a single or double bond;

[0153] each of T^{1′}, T^{1″}, T^{2′}, and T^{2″} is, independently, H, optionally substituted alkyl, optionally substituted alkoxy, or optionally substituted thioalkoxy, or the combination of T^{1′} and T^{1″} or the combination of T^{2′} and T^{2″} join together (e.g., as in T²) to form O (oxo), S (thio), or Se (seleno);

[0154] each of V¹ and V² is, independently, O, S, N(R^{Vb})ₙᵥ, or C(R^{Vb})ₙᵥ, wherein nv is an integer from 0 to 2 and each R^{Vb} is, independently, H, halo, optionally substituted amino acid, optionally substituted alkyl, optionally substituted haloalkyl, optionally substituted alkenyl, optionally substituted alkynyl, optionally substituted alkoxy, optionally substituted alkenyloxy, optionally substituted alkynyloxy, optionally substituted hydroxyalkyl, optionally substituted hydroxyalkenyl, optionally substituted hydroxyalkynyl, optionally substituted aminoalkyl (e.g., substituted with an N-protecting group, such as any described herein, e.g., trifluoroacetyl), optionally substituted aminoalkenyl, optionally substituted aminoalkynyl, optionally substituted acylaminoalkyl (e.g., substituted with an N-protecting group, such as any described herein, e.g., trifluoroacetyl), optionally substituted alkoxycarbonylalkyl, optionally substituted alkoxycarbonylalkenyl, optionally substituted alkoxycarbonylalkynyl, or optionally substituted alkoxycarbonylalkoxy (e.g., optionally substituted with any substituent described herein, such as those selected from (1)-(21) for alkyl);

[0155] R¹⁰ is H, halo, optionally substituted amino acid, hydroxy, optionally substituted alkyl, optionally substituted alkenyl, optionally substituted alkynyl, optionally substituted aminoalkyl, optionally substituted hydroxyalkyl, optionally substituted hydroxyalkenyl, optionally substituted hydroxyalkynyl, optionally substituted aminoalkenyl, optionally substituted aminoalkynyl, optionally substituted alkoxy, optionally substituted alkoxycarbonylalkyl, optionally substituted alkoxycarbonylalkenyl, optionally substituted alkoxycarbonylalkynyl, optionally substituted alkoxycarbonylalkoxy, optionally substituted carboxyalkoxy, optionally substituted carboxyalkyl, or optionally substituted carbamoylalkyl;

[0156] R¹¹ is H or optionally substituted alkyl;

[0157] R^{12a} is H, optionally substituted alkyl, optionally substituted hydroxyalkyl, optionally substituted hydroxyalkenyl, optionally substituted hydroxyalkynyl, optionally substituted aminoalkyl, optionally substituted aminoalkenyl, or optionally substituted aminoalkynyl, optionally substituted carboxyalkyl (e.g., optionally substituted with hydroxy), optionally substituted carboxyalkoxy, optionally substituted carboxyaminoalkyl, or optionally substituted carbamoylalkyl; and

[0158] R^{12c} is H, halo, optionally substituted alkyl, optionally substituted alkoxy, optionally substituted thioalkoxy, optionally substituted amino, optionally substituted hydroxyalkyl, optionally substituted hydroxyalkenyl, optionally substituted hydroxyalkynyl, optionally substituted aminoalkyl, optionally substituted aminoalkenyl, or optionally substituted aminoalkynyl.

[0159] Other exemplary modified uracils include those having Formula (b6)-(b9):

[chemical structure]

or a pharmaceutically acceptable salt or stereoisomer thereof, wherein

[0160] [symbol] is a single or double bond;

[0161] each of T^{1′}, T^{1″}, T^{2′}, and T^{2″} is, independently, H, optionally substituted alkyl, optionally substituted alkoxy, or optionally substituted thioalkoxy, or the combination of T^{1′} and T^{1″} join together (e.g., as in T¹) or the combination of T^{2′} and T^{2″} join together (e.g., as in T²) to form O (oxo), S (thio), or Se (seleno), or each T¹ and T² is, independently, O (oxo), S (thio), or Se (seleno);

[0162] each of W¹ and W² is, independently, N(R^{Wa})_{nw}, or C(R^{Wa})_{nw}, wherein nw is an integer from 0 to 2 and each ea is, independently, H, optionally substituted alkyl, or optionally substituted alkoxy;

[0163] each V³ is, independently, O, S, N(R^{Va})ₙᵥ, or C(R^{Va})ₙᵥ, wherein nv is an integer from 0 to 2 and each R^{Va} is, independently, H, halo, optionally substituted amino acid, optionally substituted alkyl, optionally substituted hydroxyalkyl, optionally substituted hydroxyalkenyl, optionally substituted hydroxyalkynyl, optionally substituted alkenyl, optionally substituted alkynyl, optionally substituted heterocyclyl, optionally substituted alkheterocyclyl, optionally substituted alkoxy, optionally substituted alkenyloxy, or optionally substituted alkynyloxy, optionally substituted aminoalkyl (e.g., substituted with an N-protecting group, such as any described herein, e.g., trifluoroacetyl, or sulfoalkyl), optionally substituted aminoalkenyl, optionally substituted aminoalkynyl, optionally substituted acylaminoalkyl (e.g., substituted with an N-protecting group, such as any described herein, e.g., trifluoroacetyl), optionally substituted alkoxycarbonylalkyl, optionally substituted alkoxycarbonylalkenyl, optionally substituted alkoxycarbonylalkynyl, optionally substituted alkoxycarbonylacyl, optionally substituted alkoxycarbonylalkoxy, optionally substituted carboxyalkyl (e.g., optionally substituted with hydroxy and/or an O-protecting group), optionally substituted carboxyalkoxy, optionally substituted carboxyaminoalkyl, or optionally substituted carbamoylalkyl (e.g., optionally substituted with any substituent described herein, such as those selected from (1)-(21) for alkyl), and wherein R^{Va} and R^{12c} taken together with the carbon atoms to which they are attached can form optionally substituted cycloalkyl, optionally substituted aryl, or optionally substituted heterocyclyl (e.g., a 5- or 6-membered ring);

[0164] R^{12a} is H, optionally substituted alkyl, optionally substituted hydroxyalkyl, optionally substituted hydroxyalkenyl, optionally substituted hydroxyalkynyl, optionally substituted aminoalkyl, optionally substituted aminoalkenyl, optionally substituted aminoalkynyl, optionally substituted carboxyalkyl (e.g., optionally substituted with hydroxy and/or an O-protecting group), optionally substituted carboxyalkoxy, optionally substituted carboxyaminoalkyl, optionally substituted carbamoylalkyl, or absent;

[0165] R^{12b} is H, optionally substituted alkyl, optionally substituted alkenyl, optionally substituted alkynyl, optionally substituted hydroxyalkyl, optionally substituted hydroxyalkenyl, optionally substituted hydroxyalkynyl, optionally substituted aminoalkyl, optionally substituted aminoalkenyl, optionally substituted aminoalkynyl, optionally substituted alkaryl, optionally substituted heterocyclyl, optionally substituted alkheterocyclyl, optionally substituted amino acid, optionally substituted alkoxycarbonylacyl, optionally substituted alkoxycarbonylalkoxy, optionally substituted alkoxycarbonylalkyl, optionally substituted alkoxycarbonylalkenyl, optionally substituted alkoxycarbonylalkynyl, optionally substituted alkoxycarbonylalkoxy, optionally substituted carboxyalkyl (e.g., optionally substituted with hydroxy and/or an O-protecting group), optionally substituted carboxyalkoxy, optionally substituted carboxyaminoalkyl, or optionally substituted carbamoylalkyl,

[0166] wherein the combination of R^{12b} and T^{1′} or the combination of R^{12b} and R^{12c} can join together to form optionally substituted heterocyclyl; and

[0167] R^{12c} is H, halo, optionally substituted alkyl, optionally substituted alkoxy, optionally substituted thioalkoxy, optionally substituted amino, optionally substituted aminoalkyl, optionally substituted aminoalkenyl, or optionally substituted aminoalkynyl.

[0168] Further exemplary modified uracils include those having Formula (b28)-(b31):

[chemical structure]

or a pharmaceutically acceptable salt or stereoisomer thereof, wherein

[0169] each of T¹ and T² is, independently, O (oxo), S (thio), or Se (seleno);

[0170] each R^{Vb′} and R^{Vb″} is, independently, H, halo, optionally substituted amino acid, optionally substituted alkyl, optionally substituted haloalkyl, optionally substituted hydroxyalkyl, optionally substituted hydroxyalkenyl, optionally substituted hydroxyalkynyl, optionally substituted alkenyl, optionally substituted alkynyl, optionally substituted alkoxy, optionally substituted alkenyloxy, optionally substituted alkynyloxy, optionally substituted aminoalkyl (e.g., substituted with an N-protecting group, such as any described herein, e.g., trifluoroacetyl, or sulfoalkyl), optionally substituted aminoalkenyl, optionally substituted aminoalkynyl, optionally substituted acylaminoalkyl (e.g., substituted with an N-protecting group, such as any described herein, e.g., trifluoroacetyl), optionally substituted alkoxycarbonylalkyl, optionally substituted alkoxycarbonylalkenyl, optionally substituted alkoxycarbonylalkynyl, optionally substituted alkoxycarbonylacyl, optionally substituted alkoxycarbonylalkoxy, optionally substituted carboxyalkyl (e.g., optionally substituted with hydroxy and/or an O-protecting group), optionally substituted carboxyalkoxy, optionally substituted carboxyaminoalkyl, or optionally substituted carbamoylalkyl (e.g., optionally substituted with any substituent described herein, such as those selected from (1)-(21) for alkyl) (e.g., R^{Vb′} is optionally substituted alkyl, optionally substituted alkenyl, or optionally substituted aminoalkyl, e.g., substituted with an N-protecting group, such as any described herein, e.g., trifluoroacetyl, or sulfoalkyl);

[0171] R^{12a} is H, optionally substituted alkyl, optionally substituted carboxyaminoalkyl, optionally substituted aminoalkyl (e.g., e.g., substituted with an N-protecting group, such as any described herein, e.g., trifluoroacetyl, or sulfoalkyl), optionally substituted aminoalkenyl, or optionally substituted aminoalkynyl; and

[0172] R^{12b} is H, optionally substituted alkyl, optionally substituted alkenyl, optionally substituted alkynyl, optionally substituted hydroxyalkyl, optionally substituted hydroxyalkenyl, optionally substituted hydroxyalkynyl, optionally substituted aminoalkyl, optionally substituted aminoalkenyl, optionally substituted aminoalkynyl (e.g., e.g., substituted with an N-protecting group, such as any described herein, e.g., trifluoroacetyl, or sulfoalkyl),

[0173] optionally substituted alkoxycarbonylacyl, optionally substituted alkoxycarbonylalkoxy, optionally substituted alkoxycarbonylalkyl, optionally substituted alkoxycarbonylalkenyl, optionally substituted alkoxycarbonylalkynyl, optionally substituted alkoxycarbonylalkoxy, optionally substituted carboxyalkoxy, optionally substituted carboxyalkyl, or optionally substituted carbamoylalkyl.

[0174] In particular embodiments, T¹ is O (oxo), and T² is S (thio) or Se (seleno). In other embodiments, T¹ is S (thio), and T² is 0 (oxo) or Se (seleno). In some embodiments, R^{Vb′} is H, optionally substituted alkyl, or optionally substituted alkoxy.

[0175] In other embodiments, each R^{12a} and R^{12b} is, independently, H, optionally substituted alkyl, optionally substituted alkenyl, optionally substituted alkynyl, or optionally substituted hydroxyalkyl. In particular embodiments, R^{12a} is H. In other embodiments, both R^{12a} and R^{12b} are H.

[0176] In some embodiments, each R^{Vb′} of Rub is, is, independently, optionally substituted aminoalkyl (e.g., substituted with an N-protecting group, such as any described herein, e.g., trifluoroacetyl, or sulfoalkyl), optionally substituted aminoalkenyl, optionally substituted aminoalkynyl, or optionally substituted acylaminoalkyl (e.g., substituted with an N-protecting group, such as any described herein, e.g., trifluoroacetyl). In some embodiments, the amino and/or alkyl of the optionally substituted aminoalkyl is substituted with one or more of optionally substituted alkyl, optionally substituted alkenyl, optionally substituted sulfoalkyl, optionally substituted carboxy (e.g., substituted with an O-protecting group), optionally substituted hydroxy (e.g., substituted with an O-protecting group), optionally substituted carboxyalkyl (e.g., substituted with an O-protecting group), optionally substituted alkoxycarbonylalkyl (e.g., substituted with an O-protecting group), or N-protecting group. In some embodiments, optionally substituted aminoalkyl is substituted with an optionally substituted sulfoalkyl or optionally substituted alkenyl. In particular embodiments, R^{12a} and R^{Vb″} are both H. In particular embodiments, T¹ is O (oxo), and T² is S (thio) or Se (seleno).

[0177] In some embodiments, R^{Vb′} is optionally substituted alkoxycarbonylalkyl or optionally substituted carbamoylalkyl.

[0178] In particular embodiments, the optional substituent for R^{12a}, R^{12b}, R^{12c}, or R^{Va} is a polyethylene glycol group (e.g., —(CH₂)ₛ₂(OCH₂CH₂)ₛ₁(CH₂)ₛ₃OR′, wherein s1 is an integer from 1 to 10 (e.g., from 1 to 6 or from 1 to 4), each of s2 and s3, independently, is an integer from 0 to 10 (e.g., from 0 to 4, from 0 to 6, from 1 to 4, from 1 to 6, or from 1 to 10), and R′ is H or C₁₋₂₀ alkyl); or an amino-polyethylene glycol group (e.g., —NR^{N1}(CH₂)ₛ₂(CH₂CH₂O)ₛ₁(CH₂)ₛ₃NR^{N1}, wherein s1 is an integer from 1 to 10 (e.g., from 1 to 6 or from 1 to 4), each of s2 and s3, independently, is an integer from 0 to 10 (e.g., from 0 to 4, from 0 to 6, from 1 to 4, from 1 to 6, or from 1 to 10), and each R^{N1} is, independently, hydrogen or optionally substituted C₁₋₆ alkyl).

[0179] In some embodiments, B is a modified cytosine. Exemplary modified cytosines include compounds (b10)-(b14):

[chemical structure]

or a pharmaceutically acceptable salt or stereoisomer thereof, wherein

[0180] each of T^{3′} and T^{3″} is, independently, H, optionally substituted alkyl, optionally substituted alkoxy, or optionally substituted thioalkoxy, or the combination of T^{3′} and T^{3″} join together (e.g., as in T³) to form O (oxo), S (thio), or Se (seleno);

[0181] each V⁴ is, independently, O, S, N(R^{Vc})ₙᵥ, or C(R^{Vc})ₙᵥ, wherein nv is an integer from 0 to 2 and each R^{Vc} is, independently, H, halo, optionally substituted amino acid, optionally substituted alkyl, optionally substituted alkenyl, optionally substituted alkynyl, optionally substituted alkoxy, optionally substituted alkenyloxy, optionally substituted heterocyclyl, optionally substituted alkheterocyclyl, or optionally substituted alkynyloxy (e.g., optionally substituted with any substituent described herein, such as those selected from (1)-(21) for alkyl), wherein the combination of R^{13b} and R^{Vc} can be taken together to form optionally substituted heterocyclyl;

[0182] each V⁵ is, independently, N(R^{Vd})ₙᵥ, or C(R^{Vd})ₙᵥ, wherein nv is an integer from 0 to 2 and each R^{Vd} is, independently, H, halo, optionally substituted amino acid, optionally substituted alkyl, optionally substituted alkenyl, optionally substituted alkynyl, optionally substituted alkoxy, optionally substituted alkenyloxy, optionally substituted heterocyclyl, optionally substituted alkheterocyclyl, or optionally substituted alkynyloxy (e.g., optionally substituted with any substituent described herein, such as those selected from (1)-(21) for alkyl) (e.g., V⁵ is —CH or N);

[0183] each of R^{13a} and R^{13b} is, independently, H, optionally substituted acyl, optionally substituted acyloxyalkyl, optionally substituted alkyl, or optionally substituted alkoxy, wherein the combination of R^{13b} and R¹⁴ can be taken together to form optionally substituted heterocyclyl;

[0184] each R¹⁴ is, independently, H, halo, hydroxy, thiol, optionally substituted acyl, optionally substituted amino acid, optionally substituted alkyl, optionally substituted haloalkyl, optionally substituted alkenyl, optionally substituted alkynyl, optionally substituted hydroxyalkyl (e.g., substituted with an O-protecting group), optionally substituted hydroxyalkenyl, optionally substituted hydroxyalkynyl, optionally substituted alkoxy, optionally substituted alkenyloxy, optionally substituted alkynyloxy, optionally substituted aminoalkoxy, optionally substituted alkoxyalkoxy, optionally substituted acyloxyalkyl, optionally substituted amino (e.g., —NHR, wherein R is H, alkyl, aryl, or phosphoryl), azido, optionally substituted aryl, optionally substituted heterocyclyl, optionally substituted alkheterocyclyl, optionally substituted aminoalkyl, optionally substituted aminoalkenyl, or optionally substituted aminoalkyl; and

[0185] each of R¹⁵ and R¹⁶ is, independently, H, optionally substituted alkyl, optionally substituted alkenyl, or optionally substituted alkynyl.

[0186] Further exemplary modified cytosines include those having Formula (b32)-(b35):

[chemical structure]

or a pharmaceutically acceptable salt or stereoisomer thereof, wherein

[0187] each of T¹ and T³ is, independently, O (oxo), S (thio), or Se (seleno);

[0188] each of R^{13a} and R^{13b} is, independently, H, optionally substituted acyl, optionally substituted acyloxyalkyl, optionally substituted alkyl, or optionally substituted alkoxy, wherein the combination of R^{13b} and R¹⁴ can be taken together to form optionally substituted heterocyclyl;

[0189] each R¹⁴ is, independently, H, halo, hydroxy, thiol, optionally substituted acyl, optionally substituted amino acid, optionally substituted alkyl, optionally substituted haloalkyl, optionally substituted alkenyl, optionally substituted alkynyl, optionally substituted hydroxyalkyl (e.g., substituted with an O-protecting group), optionally substituted hydroxyalkenyl, optionally substituted hydroxyalkynyl, optionally substituted alkoxy, optionally substituted alkenyloxy, optionally substituted alkynyloxy, optionally substituted aminoalkoxy, optionally substituted alkoxyalkoxy, optionally substituted acyloxyalkyl, optionally substituted amino (e.g., —NHR, wherein R is H, alkyl, aryl, or phosphoryl), azido, optionally substituted aryl, optionally substituted heterocyclyl, optionally substituted alkheterocyclyl, optionally substituted aminoalkyl (e.g., hydroxyalkyl, alkyl, alkenyl, or alkynyl), optionally substituted aminoalkenyl, or optionally substituted aminoalkynyl; and

[0190] each of R¹⁵ and R¹⁶ is, independently, H, optionally substituted alkyl, optionally substituted alkenyl, or optionally substituted alkynyl (e.g., R¹⁵ is H, and R¹⁶ is H or optionally substituted alkyl).

[0191] In some embodiments, R¹⁵ is H, and R¹⁶ is H or optionally substituted alkyl. In particular embodiments, R¹⁴ is H, acyl, or hydroxyalkyl. In some embodiments, R¹⁴ is halo. In some embodiments, both R¹⁴ and R¹⁵ are H. In some embodiments, both R¹⁵ and R¹⁶ are H. In some embodiments, each of R¹⁴ and R¹⁵ and R¹⁶ is H. In further embodiments, each of R^{13a} and R^{13b} is independently, H or optionally substituted alkyl.

[0192] Further non-limiting examples of modified cytosines include compounds of Formula (b36):

[chemical structure]

or a pharmaceutically acceptable salt or stereoisomer thereof, wherein

[0193] each R^{13b} is, independently, H, optionally substituted acyl, optionally substituted acyloxyalkyl, optionally substituted alkyl, or optionally substituted alkoxy, wherein the combination of R^{13b} and R^{14b} can be taken together to form optionally substituted heterocyclyl;

[0194] each R^{14a} and R^{14b} is, independently, H, halo, hydroxy, thiol, optionally substituted acyl, optionally substituted amino acid, optionally substituted alkyl, optionally substituted haloalkyl, optionally substituted alkenyl, optionally substituted alkynyl, optionally substituted hydroxyalkyl (e.g., substituted with an O-protecting group), optionally substituted hydroxyalkenyl, optionally substituted alkoxy, optionally substituted alkenyloxy, optionally substituted alkynyloxy, optionally substituted aminoalkoxy, optionally substituted alkoxyalkoxy, optionally substituted acyloxyalkyl, optionally substituted amino (e.g., —NHR, wherein R is H, alkyl, aryl, phosphoryl, optionally substituted aminoalkyl, or optionally substituted carboxyaminoalkyl), azido, optionally substituted aryl, optionally substituted heterocyclyl, optionally substituted alkheterocyclyl, optionally substituted aminoalkyl, optionally substituted aminoalkenyl, or optionally substituted aminoalkynyl; and

[0195] each of R¹⁵ is, independently, H, optionally substituted alkyl, optionally substituted alkenyl, or optionally substituted alkynyl.

[0196] In particular embodiments, R^{14b} is an optionally substituted amino acid (e.g., optionally substituted lysine). In some embodiments, R^{14a} is H.

[0197] In some embodiments, B is a modified guanine. Exemplary modified guanines include compounds of Formula (b15)-(b17):

[chemical structure]

or a pharmaceutically acceptable salt or stereoisomer thereof, wherein

[0198] each of T^{4′}, T^{4″}, T^{5′}, T^{5″}, T^{6′}, and T^{6″} is independently, H, optionally substituted alkyl, or optionally substituted alkoxy, and wherein the combination of T^{4′} and T^{4″} (e.g., as in T⁴) or the combination of T^{5′} and T^{5″} (e.g., as in T⁵) or the combination of T^{6′} and T^{6″} join together (e.g., as in T⁶) form O (oxo), S (thio), or Se (seleno);

[0199] each of V⁵ and V⁶ is, independently, O, S, N(R^{Vd})ₙᵥ, or C(R^{Vd})ₙᵥ, wherein nv is an integer from 0 to 2 and each R^{Vd} is, independently, H, halo, thiol, optionally substituted amino acid, cyano, amidine, optionally substituted aminoalkyl, optionally substituted aminoalkenyl, optionally substituted aminoalkynyl, optionally substituted alkyl, optionally substituted alkenyl, optionally substituted alkynyl, optionally substituted alkoxy, optionally substituted alkenyloxy, optionally substituted alkynyloxy (e.g., optionally substituted with any substituent described herein, such as those selected from (1)-(21) for alkyl), optionally substituted thioalkoxy, or optionally substituted amino; and

[0200] each of R¹⁷, R¹⁸, R^{19a}, R^{19b}, R²¹, R²², R²³, and R²⁴ is, independently, H, halo, thiol, optionally substituted alkyl, optionally substituted alkenyl, optionally substituted alkynyl, optionally substituted thioalkoxy, optionally substituted amino, or optionally substituted amino acid.

[0201] Exemplary modified guanosines include compounds of Formula (b37)-(b40):

[chemical structure]

or a pharmaceutically acceptable salt or stereoisomer thereof, wherein

[0202] each of T^{4′} is, independently, H, optionally substituted alkyl, or optionally substituted alkoxy, and each T⁴ is, independently, O (oxo), S (thio), or Se (seleno);

[0203] each of R¹⁸, R^{19a}, R^{19b}, and R²¹ is, independently, H, halo, thiol, optionally substituted alkyl, optionally substituted alkenyl, optionally substituted alkynyl, optionally substituted thioalkoxy, optionally substituted amino, or optionally substituted amino acid.

[0204] In some embodiments, R¹⁸ is H or optionally substituted alkyl. In further embodiments, T⁴ is oxo. In some embodiments, each of R^{19a} and R^{19b} is, independently, H or optionally substituted alkyl.

[0205] In some embodiments, B is a modified adenine. Exemplary modified adenines include compounds of Formula (b18)-(b20):

[chemical structure]

or a pharmaceutically acceptable salt or stereoisomer thereof, wherein

[0206] each V⁷ is, independently, O, S, N(R^{Ve})ₙᵥ, or C(R^{Ve})ₙᵥ, wherein nv is an integer from 0 to 2 and each R^{Ve} is, independently, H, halo, optionally substituted amino acid, optionally substituted alkyl, optionally substituted alkenyl, optionally substituted alkynyl, optionally substituted alkoxy, optionally substituted alkenyloxy, or optionally substituted alkynyloxy (e.g., optionally substituted with any substituent described herein, such as those selected from (1)-(21) for alkyl);

[0207] each R²⁵ is, independently, H, halo, thiol, optionally substituted alkyl, optionally substituted alkenyl, optionally substituted alkynyl, optionally substituted thioalkoxy, or optionally substituted amino;

[0208] each of R^{26a} and R^{26b} is, independently, H, optionally substituted acyl, optionally substituted amino acid, optionally substituted carbamoylalkyl, optionally substituted alkyl, optionally substituted alkenyl, optionally substituted alkynyl, optionally substituted hydroxyalkyl, optionally substituted hydroxyalkenyl, optionally substituted hydroxyalkynyl, optionally substituted alkoxy, or polyethylene glycol group (e.g., —(CH₂)ₛ₂(OCH₂CH₂)ₛ₁(CH₂)ₛ₃OR′, wherein s1 is an integer from 1 to 10 (e.g., from 1 to 6 or from 1 to 4), each of s2 and s3, independently, is an integer from 0 to 10 (e.g., from 0 to 4, from 0 to 6, from 1 to 4, from 1 to 6, or from 1 to 10), and R′ is H or C₁₋₂₀ alkyl); or an amino-polyethylene glycol group (e.g., —NR^{N1}(CH₂)ₛ₂(CH₂CH₂O)ₛ₁(CH₂)ₛ₃NR^{N1}, wherein s1 is an integer from 1 to 10 (e.g., from 1 to 6 or from 1 to 4), each of s2 and s3, independently, is an integer from 0 to 10 (e.g., from 0 to 4, from 0 to 6, from 1 to 4, from 1 to 6, or from 1 to 10), and each R^{N1} is, independently, hydrogen or optionally substituted C₁₋₆ alkyl);

[0209] each R²⁷ is, independently, H, optionally substituted alkyl, optionally substituted alkenyl, optionally substituted alkynyl, optionally substituted alkoxy, optionally substituted thioalkoxy or optionally substituted amino;

[0210] each R²⁸ is, independently, H, optionally substituted alkyl, optionally substituted alkenyl, or optionally substituted alkynyl; and

[0211] each R²⁹ is, independently, H, optionally substituted acyl, optionally substituted amino acid, optionally substituted carbamoylalkyl, optionally substituted alkyl, optionally substituted alkenyl, optionally substituted alkynyl, optionally substituted hydroxyalkyl, optionally substituted hydroxyalkenyl, optionally substituted alkoxy, or optionally substituted amino.

[0212] Exemplary modified adenines include compounds of Formula (b41)-(b43):

[chemical structure]

or a pharmaceutically acceptable salt or stereoisomer thereof, wherein

[0213] each R²⁵ is, independently, H, halo, thiol, optionally substituted alkyl, optionally substituted alkenyl, optionally substituted alkynyl, optionally substituted thioalkoxy, or optionally substituted amino;

[0214] each of R^{26a} and R^{26b} is, independently, H, optionally substituted acyl, optionally substituted amino acid, optionally substituted carbamoylalkyl, optionally substituted alkyl, optionally substituted alkenyl, optionally substituted alkynyl, optionally substituted hydroxyalkyl, optionally substituted hydroxyalkenyl, optionally substituted hydroxyalkynyl, optionally substituted alkoxy, or polyethylene glycol group (e.g., —(CH₂)ₛ₂(OCH₂CH₂)ₛ₁(CH₂)ₛ₃OR′, wherein s1 is an integer from 1 to 10 (e.g., from 1 to 6 or from 1 to 4), each of s2 and s3, independently, is an integer from 0 to 10 (e.g., from 0 to 4, from 0 to 6, from 1 to 4, from 1 to 6, or from 1 to 10), and R′ is H or C₁₋₂₀ alkyl); or an amino-polyethylene glycol group (e.g., —NR^{Ni}(CH₂)ₛ₂(CH₂CH₂O)ₛ₁(CH₂)ₛ₃NR^{N1}, wherein s1 is an integer from 1 to 10 (e.g., from 1 to 6 or from 1 to 4), each of s2 and s3, independently, is an integer from 0 to 10 (e.g., from 0 to 4, from 0 to 6, from 1 to 4, from 1 to 6, or from 1 to 10), and each R^{N1} is, independently, hydrogen or optionally substituted C₁₋₆ alkyl); and

[0215] each R²⁷ is, independently, H, optionally substituted alkyl, optionally substituted alkenyl, optionally substituted alkynyl, optionally substituted alkoxy, optionally substituted thioalkoxy, or optionally substituted amino.

[0216] In some embodiments, R^{26a} is H, and R^{26b} is optionally substituted alkyl. In some embodiments, each of R^{26a} and R^{26b} is, independently, optionally substituted alkyl. In particular embodiments, R²⁷ is optionally substituted alkyl, optionally substituted alkoxy, or optionally substituted thioalkoxy. In other embodiments, R²⁵ is optionally substituted alkyl, optionally substituted alkoxy, or optionally substituted thioalkoxy.

[0217] In particular embodiments, the optional substituent for R^{26a}, R^{26b}, or R²⁹ is a polyethylene glycol group (e.g., —(CH₂)ₛ₂(OCH₂CH₂)ₛ₁(CH₂)ₛ₃OR′, wherein s1 is an integer from 1 to 10 (e.g., from 1 to 6 or from 1 to 4), each of s2 and s3, independently, is an integer from 0 to 10 (e.g., from 0 to 4, from 0 to 6, from 1 to 4, from 1 to 6, or from 1 to 10), and R′ is H or C₁₋₂₀ alkyl); or an amino-polyethylene glycol group (e.g., —NR^{N1}(CH₂)ₛ₂(CH₂CH₂O)ₛ₁(CH₂)ₛ₃NR^{N1}, wherein s1 is an integer from 1 to 10 (e.g., from 1 to 6 or from 1 to 4), each of s2 and s3, independently, is an integer from 0 to 10 (e.g., from 0 to 4, from 0 to 6, from 1 to 4, from 1 to 6, or from 1 to 10), and each R^{N1} is, independently, hydrogen or optionally substituted C₁₋₆ alkyl).

[0218] In some embodiments, B may have Formula (b21):

[chemical structure]

wherein X¹² is, independently, O, S, optionally substituted alkylene (e.g., methylene), or optionally substituted heteroalkylene, xa is an integer from 0 to 3, and R^{12a} and T² are as described herein.

[0219] In some embodiments, B may have Formula (b22):

[chemical structure]

wherein R^{10′} is, independently, optionally substituted alkyl, optionally substituted alkenyl, optionally substituted alkynyl, optionally substituted aryl, optionally substituted heterocyclyl, optionally substituted aminoalkyl, optionally substituted aminoalkenyl, optionally substituted aminoalkynyl, optionally substituted alkoxy, optionally substituted alkoxycarbonylalkyl, optionally substituted alkoxycarbonylalkenyl, optionally substituted alkoxycarbonylalkynyl, optionally substituted alkoxycarbonylalkoxy, optionally substituted carboxyalkoxy, optionally substituted carboxyalkyl, or optionally substituted carbamoylalkyl, and R¹¹, R^{12a}, T¹, and T² are as described herein.

[0220] In some embodiments, B may have Formula (b23):

[chemical structure]

wherein R¹⁰ is optionally substituted heterocyclyl (e.g., optionally substituted furyl, optionally substituted thienyl, or optionally substituted pyrrolyl), optionally substituted aryl (e.g., optionally substituted phenyl or optionally substituted naphthyl), or any substituent described herein (e.g., for R¹⁰); and wherein R¹¹ (e.g., H or any substituent described herein), R^{12a} (e.g., H or any substituent described herein), T¹ (e.g., oxo or any substituent described herein), and T² (e.g., oxo or any substituent described herein) are as described herein.

[0221] In some embodiments, B may have Formula (b24):

[chemical structure]

wherein R^{14′} is, independently, optionally substituted alkyl, optionally substituted alkenyl, optionally substituted alkynyl, optionally substituted aryl, optionally substituted heterocyclyl, optionally substituted alkaryl, optionally substituted alkheterocyclyl, optionally substituted aminoalkyl, optionally substituted aminoalkenyl, optionally substituted aminoalkynyl, optionally substituted alkoxy, optionally substituted alkoxycarbonylalkyl, optionally substituted alkoxycarbonylalkenyl, optionally substituted alkoxycarbonylalkynyl, optionally substituted alkoxycarbonylalkoxy, optionally substituted carboxyalkoxy, optionally substituted carboxyalkyl, or optionally substituted carbamoylalkyl, and R^{13a}, R^{13b}, R¹⁵, and T³ are as described herein.

[0222] In some embodiments, B may have Formula (b25):

[chemical structure]

wherein R^{14′} is optionally substituted heterocyclyl (e.g., optionally substituted furyl, optionally substituted thienyl, or optionally substituted pyrrolyl), optionally substituted aryl (e.g., optionally substituted phenyl or optionally substituted naphthyl), or any substituent described herein (e.g., for R¹⁴ or R^{14′}); and wherein R^{13a} (e.g., H or any substituent described herein), R^{13b} (e.g., H or any substituent described herein), R¹⁵ (e.g., H or any substituent described herein), and T³ (e.g., oxo or any substituent described herein) are as described herein.

[0223] In some embodiments, B is a nucleobase selected from the group consisting of cytosine, guanine, adenine, and uracil. In some embodiments, B may be:

[chemical structure]

[0224] In some embodiments, the modified nucleobase is a modified uracil. Exemplary nucleobases and nucleosides having a modified uracil include pseudouridine (ψ), pyridin-4-one ribonucleoside, 5-aza-uridine, 6-aza-uridine, 2-thio-5-aza-uridine, 2-thio-uridine (s²U), 4-thio-uridine (s⁴U), 4-thio-pseudouridine, 2-thio-pseudouridine, 5-hydroxy-uridine (ho⁵U), 5-aminoallyl-uridine, 5-halo-uridine (e.g., 5-iodo-uridine or 5-bromo-uridine), 3-methyl-uridine (m³U), 5-methoxy-uridine (mo⁵U), uridine 5-oxyacetic acid (cmo⁵U), uridine 5-oxyacetic acid methyl ester (mcmo⁵U), 5-carboxymethyl-uridine (cm⁵U), 1-carboxymethyl-pseudouridine, 5-carboxyhydroxymethyl-uridine (chm⁵U), 5-carboxyhydroxymethyl-uridine methyl ester (mchm⁵U), 5-methoxycarbonylmethyl-uridine (mcm⁵U), 5-methoxycarbonylmethyl-2-thio-uridine (mcm⁵s²U), 5-aminomethyl-2-thio-uridine (nm⁵s²U), 5-methylaminomethyl-uridine (mnm⁵U), 5-methylaminomethyl-2-thio-uridine (mnm⁵s²U), 5-methylaminomethyl-2-seleno-uridine (mnm⁵se²U), 5-carbamoylmethyl-uridine (ncm⁵U), 5-carboxymethylaminomethyl-uridine (cmnm⁵U), 5-carboxymethylaminomethyl-2-thio-uridine (cmnm⁵s²U), 5-propynyl-uridine, 1-propynyl-pseudouridine, 5-taurinomethyl-uridine (τm⁵U), 1-taurinomethyl-pseudouridine, 5-taurinomethyl-2-thio-uridine(τm⁵s²U), 1-taurinomethyl-4-thio-pseudouridine, 5-methyl-uridine (m⁵U, i.e., having the nucleobase deoxythymine), 1-methyl-pseudouridine (m¹ψ), 5-methyl-2-thio-uridine (m⁵s²U), 1-methyl-4-thio-pseudouridine (m¹s⁴ψ), 4-thio-1-methyl-pseudouridine, 3-methyl-pseudouridine (m³ψ), 2-thio-1-methyl-pseudouridine, 1-methyl-1-deaza-pseudouridine, 2-thio-1-methyl-1-deaza-pseudouridine, dihydrouridine (D), dihydropseudouridine, 5,6-dihydrouridine, 5-methyl-dihydrouridine (m⁵D), 2-thio-dihydrouridine, 2-thio-dihydropseudouridine, 2-methoxy-uridine, 2-methoxy-4-thio-uridine, 4-methoxy-pseudouridine, 4-methoxy-2-thio-pseudouridine, N1-methyl-pseudouridine, 3-(3-amino-3-carboxypropyl)uridine (acp³U), 1-methyl-3-(3-amino-3-carboxypropyl)pseudouridine (acp³ψ), 5-(isopentenylaminomethyl)uridine (inm⁵U), 5-(isopentenylaminomethyl)-2-thio-uridine (inm⁵s²U), α-thio-uridine, 2′-O-methyl-uridine (Um), 5,2′-O-dimethyl-uridine (m⁵Um), 2′-O-methyl-pseudouridine (ψm), 2-thio-2′-O-methyl-uridine (s²Um), 5-methoxycarbonylmethyl-2′-O-methyl-uridine (mcm⁵Um), 5-carbamoylmethyl-2′-O-methyl-uridine (ncm⁵Um), 5-carboxymethylaminomethyl-2′-O-methyl-uridine (cmnm⁵Um), 3,2′-O-dimethyl-uridine (m³Um), 5-(isopentenylaminomethyl)-2′-O-methyl-uridine (inm⁵Um), 1-thio-uridine, deoxythymidine, 2′-F-ara-uridine, 2′-F-uridine, 2′-OH-ara-uridine, 5-(2-carbomethoxyvinyl) uridine, and 5-[3-(1-E-propenylamino)uridine.

[0225] In some embodiments, the modified nucleobase is a modified cytosine. Exemplary nucleobases and nucleosides having a modified cytosine include 5-aza-cytidine, 6-aza-cytidine, pseudoisocytidine, 3-methyl-cytidine (m³C), N4-acetyl-cytidine (ac⁵C), 5-formyl-cytidine (f⁵C), N4-methyl-cytidine (m⁴C), 5-methyl-cytidine (m⁵C), 5-halo-cytidine (e.g., 5-iodo-cytidine), 5-hydroxymethyl-cytidine (hm⁵C), 1-methyl-pseudoisocytidine, pyrrolo-cytidine, pyrrolo-pseudoisocytidine, 2-thio-cytidine (s²C), 2-thio-5-methyl-cytidine, 4-thio-pseudoisocytidine, 4-thio-1-methyl-pseudoisocytidine, 4-thio-1-methyl-1-deaza-pseudoisocytidine, 1-methyl-1-deaza-pseudoisocytidine, zebularine, 5-aza-zebularine, 5-methyl-zebularine, 5-aza-2-thio-zebularine, 2-thio-zebularine, 2-methoxy-cytidine, 2-methoxy-5-methyl-cytidine, 4-methoxy-pseudoisocytidine, 4-methoxy-1-methyl-pseudoisocytidine, lysidine (k₂C), α-thio-cytidine, 2′-O-methyl-cytidine (Cm), 5,2′-O-dimethyl-cytidine (m⁵Cm), N4-acetyl-2′-O-methyl-cytidine (ac⁴Cm), N4,2′-O-dimethyl-cytidine (m⁴Cm), 5-formyl-2′-O-methyl-cytidine (f⁵Cm), N4,N4,2′-O-trimethyl-cytidine (m₂⁴Cm), 1-thio-cytidine, 2′-F-ara-cytidine, 2′-F-cytidine, and 2′-OH-ara-cytidine.

[0226] In some embodiments, the modified nucleobase is a modified adenine. Exemplary nucleobases and nucleosides having a modified adenine include 2-amino-purine, 2,6-diaminopurine, 2-amino-6-halo-purine (e.g., 2-amino-6-chloro-purine), 6-halo-purine (e.g., 6-chloro-purine), 2-amino-6-methyl-purine, 8-azido-adenosine, 7-deaza-adenine, 7-deaza-8-aza-adenine, 7-deaza-2-amino-purine, 7-deaza-8-aza-2-amino-purine, 7-deaza-2,6-diaminopurine, 7-deaza-8-aza-2,6-diaminopurine, 1-methyl-adenosine (m¹A), 2-methyl-adenine (m²A), N6-methyl-adenosine (m⁶A), 2-methylthio-N6-methyl-adenosine (ms²m⁶A), N6-isopentenyl-adenosine (i⁶A), 2-methylthio-N-6-isopentenyl-adenosine (ms²i⁶A), N6-(cis-hydroxyisopentenyl)adenosine (io⁶A), 2-methylthio-N-6-(cis-hydroxyisopentenyl)adenosine (ms²io⁶A), N6-glycinylcarbamoyl-adenosine (g⁶A), N6-threonylcarbamoyl-adenosine (t⁶A), N6-methyl-N6-threonylcarbamoyl-adenosine (m⁶t⁶A), 2-methylthio-N6-threonylcarbamoyl-adenosine (ms²g⁶A), N6,N6-dimethyl-adenosine (m⁶₂A), N6-hydroxynorvalylcarbamoyl-adenosine (hn⁶A), 2-methylthio-N6-hydroxynorvalylcarbamoyl-adenosine (ms²hn⁶A), N6-acetyl-adenosine (ac⁶A), 7-methyl-adenine, 2-methylthio-adenine, 2-methoxy-adenine, α-thio-adenosine, 2′-O-methyl-adenosine (Am), N6,2′-O-dimethyl-adenosine (m⁶Am), N6,N6,2′-O-trimethyl-adenosine (m⁶₂Am), 1,2′-O-dimethyl-adenosine (m⁶Am), 2′-O-ribosyladenosine (phosphate) (Ar(p)), 2-amino-N6-methyl-purine, 1-thio-adenosine, 8-azido-adenosine, 2′-F-ara-adenosine, 2′-F-adenosine, 2′-OH-ara-adenosine, and N6-(19-amino-pentaoxanonadecyl)-adenosine.

[0227] In some embodiments, the modified nucleobase is a modified guanine Exemplary nucleobases and nucleosides having a modified guanine include inosine (I), 1-methyl-inosine (m¹I), wyosine (imG), methylwyosine (mimG), 4-demethyl-wyosine (imG-14), isowyosine (imG2), wybutosine (yW), peroxywybutosine (o₂yW), hydroxywybutosine (OHyW), undermodified hydroxywybutosine (OHyW*), 7-deaza-guanosine, queuosine (O), epoxyqueuosine (oQ), galactosyl-queuosine (galQ), mannosyl-queuosine (manQ), 7-cyano-7-deaza-guanosine (preQ₀), 7-aminomethyl-7-deaza-guanosine (preQ₁), archaeosine (G⁺), 7-deaza-8-aza-guanosine, 6-thio-guanosine, 6-thio-7-deaza-guanosine, 6-thio-7-deaza-8-aza-guanosine, 7-methyl-guanosine (m⁷G), 6-thio-7-methyl-guanosine, 7-methyl-inosine, 6-methoxy-guanosine, 1-methyl-guanosine (m¹G), N2-methyl-guanosine (m²G), N2,N2-dimethyl-guanosine (m²₂G), N2,7-dimethyl-guanosine (m^{2,7}G), N2, N2,7-dimethyl-guanosine (M^{2,2,7}G), 8-oxo-guanosine, 7-methyl-8-oxo-guanosine, 1-meth thio-guanosine, N2-methyl-6-thio-guanosine, N2,N2-dimethyl-6-thio-guanosine, α-thio-guanosine, 2′-O-methyl-guanosine (Gm), N2-methyl-2′-O-methyl-guanosine (m²Gm), N2,N2-dimethyl-2′-O-methyl-guanosine (m²₂Gm), 1-methyl-2′-O-methyl-guanosine (m′Gm), N2,7-dimethyl-2′-O-methyl-guanosine (m^{2,7}Gm), 2′-O-methyl-inosine (Im), 1,2′-O-dimethyl-inosine (m¹Im), 2′-O-ribosylguanosine (phosphate) (Gr(p)), 1-thio-guanosine, O6-methyl-guanosine, 2′-F-ara-guanosine, and 2′-F-guanosine.

[0228] The nucleobase of the nucleotide can be independently selected from a purine, a pyrimidine, a purine or pyrimidine analog. For example, the nucleobase can each be independently selected from adenine, cytosine, guanine, uracil, or hypoxanthine. In another embodiment, the nucleobase can also include, for example, naturally-occurring and synthetic derivatives of a base, including pyrazolo[3,4-d]pyrimidines, 5-methylcytosine (5-me-C), 5-hydroxymethyl cytosine, xanthine, hypoxanthine, 2-aminoadenine, 6-methyl and other alkyl derivatives of adenine and guanine, 2-propyl and other alkyl derivatives of adenine and guanine, 2-thiouracil, 2-thiothymine and 2-thiocytosine, 5-propynyl uracil and cytosine, 6-azo uracil, cytosine and thymine, 5-uracil (pseudouracil), 4-thiouracil, 8-halo (e.g., 8-bromo), 8-amino, 8-thiol, 8-thioalkyl, 8-hydroxyl and other 8-substituted adenines and guanines, 5-halo particularly 5-bromo, 5-trifluoromethyl and other 5-substituted uracils and cytosines, 7-methylguanine and 7-methyladenine, 8-azaguanine and 8-azaadenine, deazaguanine, 7-deazaguanine, 3-deazaguanine, deazaadenine, 7-deazaadenine, 3-deazaadenine, pyrazolo[3,4-d]pyrimidine, imidazo[1,5-a]1,3,5 triazinones, 9-deazapurines, imidazo[4,5-d]pyrazines, thiazolo[4,5-d]pyrimidines, pyrazin-2-ones, 1,2,4-triazine, pyridazine; and 1,3,5 triazine. When the nucleotides are depicted using the shorthand A, G, C, T or U, each letter refers to the representative base and/or derivatives thereof, e.g., A includes adenine or adenine analogs, e.g., 7-deaza adenine).

### Modifications on the Internucleoside Linkage

[0229] The modified nucleosides and nucleotides, which may be incorporated into a modified nucleic acid or mRNA molecule, can be modified on the internucleoside linkage (e.g., phosphate backbone). The phosphate groups of the backbone can be modified by replacing one or more of the oxygen atoms with a different substituent. Further, the modified nucleosides and nucleotides can include the wholesale replacement of an unmodified phosphate moiety with a modified phosphate as described herein. Examples of modified phosphate groups include, but are not limited to, phosphorothioate, phosphoroselenates, boranophosphates, boranophosphate esters, hydrogen phosphonates, phosphoramidates, phosphorodiamidates, alkyl or aryl phosphonates, and phosphotriesters. Phosphorodithioates have both non-linking oxygens replaced by sulfur. The phosphate linker can also be modified by the replacement of a linking oxygen with nitrogen (bridged phosphoramidates), sulfur (bridged phosphorothioates), and carbon (bridged methylene-phosphonates).

[0230] The α-thio substituted phosphate moiety is provided to confer stability to RNA and DNA polymers through the unnatural phosphorothioate backbone linkages. Phosphorothioate DNA and RNA have increased nuclease resistance and subsequently a longer half-life in a cellular environment. Phosphorothioate linked modified nucleic acids or mRNA molecules are expected to also reduce the innate immune response through weaker binding/activation of cellular innate immune molecules.

[0231] In specific embodiments, a modified nucleoside is 5′-O-(1-Thiophosphate)-Adenosine, 5′-O-(1-Thiophosphate)-Cytidine, 5′-O-(1-Thiophosphate)-Guanosine, 5′-O-(1-Thiophosphate)-Uridine or 5′-O-(1-Thiophosphate)-Pseudouridine.

[chemical structure]

### Combinations of Modified Sugars, Nucleobases, and Internucleoside Linkages

[0232] The modified nucleic acids and mRNA of the invention can include a combination of modifications to the sugar, the nucleobase, and/or the internucleoside linkage. These combinations can include any one or more modifications described herein. For examples, any of the nucleotides described herein in Formulas (Ia), (Ia-1)-(Ia-3), (Ib)-(If), (IIa)-(IIp), (IIb-1), (IIb-2), (IIc-1)-(IIc-2), (IIn-1), (IIn-2), (IVa)-(IV1), and (IXa)-(IXr) can be combined with any of the nucleobases described herein (e.g., in Formulas (b1)-(b43) or any other described herein).

Synthesis of Modified Nucleic Acids and mRNA Molecules

[0233] The modified nucleic acids for use in accordance with the invention may be prepared according to any available technique including, but not limited to chemical synthesis, enzymatic synthesis, which is generally termed in vitro transcription, enzymatic or chemical cleavage of a longer precursor, etc. Methods of synthesizing RNAs are known in the art (see, e.g., Gait, M. J. (ed.) Oligonucleotide synthesis: a practical approach, Oxford [Oxfordshire], Washington, D.C.: IRL Press, 1984; and Herdewijn, P. (ed.) Oligonucleotide synthesis: methods and applications, Methods in Molecular Biology, v. 288 (Clifton, N.J.) Totowa, N.J.: Humana Press, 2005; both of which are incorporated herein by reference).

[0234] The modified nucleic acids disclosed herein can be prepared from readily available starting materials using the following general methods and procedures. It is understood that where typical or preferred process conditions (i.e., reaction temperatures, times, mole ratios of reactants, solvents, pressures, etc.) are given; other process conditions can also be used unless otherwise stated. Optimum reaction conditions may vary with the particular reactants or solvent used, but such conditions can be determined by one skilled in the art by routine optimization procedures.

[0235] The processes described herein can be monitored according to any suitable method known in the art. For example, product formation can be monitored by spectroscopic means, such as nuclear magnetic resonance spectroscopy (e.g., ¹H or ¹³C) infrared spectroscopy, spectrophotometry (e.g., UV-visible), mass spectrometry, or by chromatography such as high performance liquid chromatography (HPLC) or thin layer chromatography.

[0236] Preparation of modified nucleosides and nucleotides can involve the protection and deprotection of various chemical groups. The need for protection and deprotection, and the selection of appropriate protecting groups can be readily determined by one skilled in the art. The chemistry of protecting groups can be found, for example, in Greene, et al., Protective Groups in Organic Synthesis, 2d. Ed., Wiley & Sons, 1991, which is incorporated herein by reference in its entirety.

[0237] The reactions of the processes described herein can be carried out in suitable solvents, which can be readily selected by one of skill in the art of organic synthesis. Suitable solvents can be substantially nonreactive with the starting materials (reactants), the intermediates, or products at the temperatures at which the reactions are carried out, i.e., temperatures which can range from the solvent's freezing temperature to the solvent's boiling temperature. A given reaction can be carried out in one solvent or a mixture of more than one solvent. Depending on the particular reaction step, suitable solvents for a particular reaction step can be selected.

[0238] Resolution of racemic mixtures of modified nucleosides and nucleotides can be carried out by any of numerous methods known in the art. An example method includes fractional recrystallization using a “chiral resolving acid” which is an optically active, salt-forming organic acid. Suitable resolving agents for fractional recrystallization methods are, for example, optically active acids, such as the D and L forms of tartaric acid, diacetyltartaric acid, dibenzoyltartaric acid, mandelic acid, malic acid, lactic acid or the various optically active camphorsulfonic acids. Resolution of racemic mixtures can also be carried out by elution on a column packed with an optically active resolving agent (e.g., dinitrobenzoylphenylglycine). Suitable elution solvent composition can be determined by one skilled in the art.

[0239] Modified nucleic acids can be prepared according to the synthetic methods described in Ogata et al. Journal of Organic Chemistry 74:2585-2588, 2009; Purmal et al. Nucleic Acids Research 22 (1): 72-78, 1994; Fukuhara et al. Biochemistry 1(4): 563-568, 1962; and Xu et al. Tetrahedron 48(9): 1729-1740, 1992, each of which are incorporated by reference in their entirety.

[0240] The modified nucleic acids need not be uniformly modified along the entire length of the molecule. Modified nucleic acid molecules need not be uniformly modified along the entire length of the molecule. Different nucleic acid modifications and/or backbone structures may exist at various positions in the nucleic acid. One of ordinary skill in the art will appreciate that the nucleotide analogs or other modification(s) may be located at any position(s) of a nucleic acid such that the function of the nucleic acid is not substantially decreased. A modification may also be a 5′ or 3′ terminal modification. The nucleic acids may contain at a minimum one modified nucleotide and at maximum 100% modified nucleotides, or any intervening percentage, such as at least 5% modified nucleotides, at least 10% modified nucleotides, at least 25% modified nucleotides, at least 50% modified nucleotides, at least 80% modified nucleotides, or at least 90% modified nucleotides. For example, the nucleic acids may contain a modified pyrimidine such as uracil or cytosine. In some embodiments, at least 5%, at least 10%, at least 25%, at least 50%, at least 80%, at least 90% or 100% of the uracil in the nucleic acid may be replaced with a modified uracil. The modified uracil can be replaced by a compound having a single unique structure, or can be replaced by a plurality of compounds having different structures (e.g., 2, 3, 4 or more unique structures). In some embodiments, at least 5%, at least 10%, at least 25%, at least 50%, at least 80%, at least 90% or 100% of the cytosine in the nucleic acid may be replaced with a modified cytosine. The modified cytosine can be replaced by a compound having a single unique structure, or can be replaced by a plurality of compounds having different structures (e.g., 2, 3, 4 or more unique structures).

[0241] Generally, the shortest length of a modified mRNA, herein “mRNA,” of the present disclosure can be the length of an mRNA sequence that may be sufficient to encode for a dipeptide. In another embodiment, the length of the mRNA sequence may be sufficient to encode for a tripeptide. In another embodiment, the length of an mRNA sequence may be sufficient to encode for a tetrapeptide. In another embodiment, the length of an mRNA sequence may be sufficient to encode for a pentapeptide. In another embodiment, the length of an mRNA sequence may be sufficient to encode for a hexapeptide. In another embodiment, the length of an mRNA sequence may be sufficient to encode for a heptapeptide. In another embodiment, the length of an mRNA sequence may be sufficient to encode for an octapeptide. In another embodiment, the length of an mRNA sequence may be sufficient to encode for a nonapeptide. In another embodiment, the length of an mRNA sequence may be sufficient to encode for a decapeptide.

[0242] Examples of dipeptides that the modified nucleic acid molecule sequences can encode for include, but are not limited to, carnosine and anserine.

[0243] Generally, the length of a modified mRNA of the present invention is greater than 30 nucleotides in length. In another embodiment, the RNA molecule is greater than 35 nucleotides in length. In another embodiment, the length is at least 40 nucleotides. In another embodiment, the length is at least 45 nucleotides. In another embodiment, the length is at least 55 nucleotides. In another embodiment, the length is at least 60 nucleotides. In another embodiment, the length is at least 60 nucleotides. In another embodiment, the length is at least 80 nucleotides. In another embodiment, the length is at least 90 nucleotides. In another embodiment, the length is at least 100 nucleotides. In another embodiment, the length is at least 120 nucleotides. In another embodiment, the length is at least 140 nucleotides. In another embodiment, the length is at least 160 nucleotides. In another embodiment, the length is at least 180 nucleotides. In another embodiment, the length is at least 200 nucleotides. In another embodiment, the length is at least 250 nucleotides. In another embodiment, the length is at least 300 nucleotides. In another embodiment, the length is at least 350 nucleotides. In another embodiment, the length is at least 400 nucleotides. In another embodiment, the length is at least 450 nucleotides. In another embodiment, the length is at least 500 nucleotides. In another embodiment, the length is at least 600 nucleotides. In another embodiment, the length is at least 700 nucleotides. In another embodiment, the length is at least 800 nucleotides. In another embodiment, the length is at least 900 nucleotides. In another embodiment, the length is at least 1000 nucleotides. In another embodiment, the length is at least 1100 nucleotides. In another embodiment, the length is at least 1200 nucleotides. In another embodiment, the length is at least 1300 nucleotides. In another embodiment, the length is at least 1400 nucleotides. In another embodiment, the length is at least 1500 nucleotides. In another embodiment, the length is at least 1600 nucleotides. In another embodiment, the length is at least 1800 nucleotides. In another embodiment, the length is at least 2000 nucleotides. In another embodiment, the length is at least 2500 nucleotides. In another embodiment, the length is at least 3000 nucleotides. In another embodiment, the length is at least 4000 nucleotides. In another embodiment, the length is at least 5000 nucleotides, or greater than 5000 nucleotides. In another embodiment, the length is at least 5000 nucleotides, or greater than 6000 nucleotides. In another embodiment, the length is at least 7000 nucleotides, or greater than 7000 nucleotides. In another embodiment, the length is at least 8000 nucleotides, or greater than 8000 nucleotides. In another embodiment, the length is at least 9000 nucleotides, or greater than 9000 nucleotides. In another embodiment, the length is at least 10,000 nucleotides, or greater than 10,000 nucleotides.

[0244] Different nucleotide modifications and/or backbone structures may exist at various positions in the nucleic acid. One of ordinary skill in the art will appreciate that the nucleotide analogs or other modification(s) may be located at any position(s) of a nucleic acid such that the function of the nucleic acid is not substantially decreased. A modification may also be a 5′ or 3′ terminal modification. The nucleic acids may contain at a minimum one and at maximum 100% modified nucleotides, or any intervening percentage, such as at least 50% modified nucleotides, at least 80% modified nucleotides, or at least 90% modified nucleotides. For example, one or more or all types of nucleotide (e.g., purine or pyrimidine, or any one or more or all of A, G, U, C) may or may not be uniformly modified in a polynucleotide of the invention, or in a given predetermined sequence region thereof. In some embodiments, all nucleotides X in a polynucleotide of the invention (or in a given sequence region thereof) are modified, wherein X may any one of nucleotides A, G, U, C, or any one of the combinations A+G, A+U, A+C, G+U, G+C, U+C, A+G+U, A+G+C, G+U+C or A+G+C

[0245] Different sugar modifications, nucleotide modifications, and/or internucleoside linkages (e.g., backbone structures) may exist at various positions in the modified nucleic acid or mRNA. One of ordinary skill in the art will appreciate that the nucleotide analogs or other modification(s) may be located at any position(s) of a modified nucleic acid or mRNA such that the function of the modified nucleic acid or mRNA is not substantially decreased. A modification may also be a 5′ or 3′ terminal modification. The modified nucleic acid or mRNA may contain from about 1% to about 100% modified nucleotides, or any intervening percentage (e.g., from 1% to 20%, from 1% to 25%, from 1% to 50%, from 1% to 60%, from 1% to 70%, from 1% to 80%, from 1% to 90%, from 1% to 95%, from 10% to 20%, from 10% to 25%, from 10% to 50%, from 10% to 60%, from 10% to 70%, from 10% to 80%, from 10% to 90%, from 10% to 95%, from 10% to 100%, from 20% to 25%, from 20% to 50%, from 20% to 60%, from 20% to 70%, from 20% to 80%, from 20% to 90%, from 20% to 95%, from 20% to 100%, from 50% to 60%, from 50% to 70%, from 50% to 80%, from 50% to 90%, from 50% to 95%, from 50% to 100%, from 70% to 80%, from 70% to 90%, from 70% to 95%, from 70% to 100%, from 80% to 90%, from 80% to 95%, from 80% to 100%, from 90% to 95%, from 90% to 100%, and from 95% to 100%).

[0246] In some embodiments, the modified nucleic acid or mRNA includes a modified pyrimidine (e.g., a modified uracil/uridine or modified cytosine/cytidine). In some embodiments, the uracil or uridine in the modified nucleic acid or mRNA molecule may be replaced with from about 1% to about 100% of a modified uracil or modified uridine (e.g., from 1% to 20%, from 1% to 25%, from 1% to 50%, from 1% to 60%, from 1% to 70%, from 1% to 80%, from 1% to 90%, from 1% to 95%, from 10% to 20%, from 10% to 25%, from 10% to 50%, from 10% to 60%, from 10% to 70%, from 10% to 80%, from 10% to 90%, from 10% to 95%, from 10% to 100%, from 20% to 25%, from 20% to 50%, from 20% to 60%, from 20% to 70%, from 20% to 80%, from 20% to 90%, from 20% to 95%, from 20% to 100%, from 50% to 60%, from 50% to 70%, from 50% to 80%, from 50% to 90%, from 50% to 95%, from 50% to 100%, from 70% to 80%, from 70% to 90%, from 70% to 95%, from 70% to 100%, from 80% to 90%, from 80% to 95%, from 80% to 100%, from 90% to 95%, from 90% to 100%, and from 95% to 100% of a modified uracil or modified uridine). The modified uracil or uridine can be replaced by a compound having a single unique structure, or can be replaced by a plurality of compounds having different structures (e.g., 2, 3, 4 or more unique structures, as described herein). In some embodiments, the cytosine or cytidine in the modified nucleic acid or mRNA molecule may be replaced with from about 1% to about 100% of a modified cytosine or modified cytidine (e.g., from 1% to 20%, from 1% to 25%, from 1% to 50%, from 1% to 60%, from 1% to 70%, from 1% to 80%, from 1% to 90%, from 1% to 95%, from 10% to 20%, from 10% to 25%, from 10% to 50%, from 10% to 60%, from 10% to 70%, from 10% to 80%, from 10% to 90%, from 10% to 95%, from 10% to 100%, from 20% to 25%, from 20% to 50%, from 20% to 60%, from 20% to 70%, from 20% to 80%, from 20% to 90%, from 20% to 95%, from 20% to 100%, from 50% to 60%, from 50% to 70%, from 50% to 80%, from 50% to 90%, from 50% to 95%, from 50% to 100%, from 70% to 80%, from 70% to 90%, from 70% to 95%, from 70% to 100%, from 80% to 90%, from 80% to 95%, from 80% to 100%, from 90% to 95%, from 90% to 100%, and from 95% to 100% of a modified cytosine or modified cytidine). The modified cytosine or cytidine can be replaced by a compound having a single unique structure or by a plurality of compounds having different structures (e.g., 2, 3, 4 or more unique structures, as described herein).

[0247] In some embodiments, the present disclosure provides methods of synthesizing a modified nucleic acid or mRNA including n number of linked nucleosides having Formula (Ia-1):

[chemical structure]

comprising:

[0248] a) reacting a nucleotide of Formula (IV-1):

[chemical structure]

[0249] with a phosphoramidite compound of Formula (V-1):

[chemical structure]

wherein Y⁹ is H, hydroxy, phosphoryl, pyrophosphate, sulfate, amino, thiol, optionally substituted amino acid, or a peptide (e.g., including from 2 to 12 amino acids); and each P¹, P², and P³ is, independently, a suitable protecting group; and

[chemical structure]

denotes a solid support;

[0250] to provide a modified nucleic acid or mRNA of Formula (VI-1):

[chemical structure]

and

[0251] b) oxidizing or sulfurizing the modified nucleic acid or mRNA of Formula (V) to yield a modified nucleic acid or mRNA of Formula (VII-1):

[chemical structure]

and

[0252] c) removing the protecting groups to yield the modified nucleic acid or mRNA of Formula (Ia).

[0253] In some embodiments, steps a) and b) are repeated from 1 to about 10,000 times. In some embodiments, the methods further comprise a nucleotide (e.g., building block molecule) selected from the group consisting of adenosine, cytosine, guanosine, and uracil. In some embodiments, the nucleobase may be a pyrimidine or derivative thereof. In some embodiments, the modified nucleic acid or mRNA is translatable.

[0254] Other components of modified nucleic acids and mRNA are optional, and are beneficial in some embodiments. For example, a 5′ untranslated region (UTR) and/or a 3′UTR are provided, wherein either or both may independently contain one or more different nucleoside modifications. In such embodiments, nucleoside modifications may also be present in the translatable region. Also provided are modified nucleic acids and mRNA containing a Kozak sequence.

[0255] Additionally, provided are nucleic acids containing one or more intronic nucleotide sequences capable of being excised from the nucleic acid.

[0256] Exemplary syntheses of modified nucleotides, which are incorporated into a modified nucleic acid or mRNA, e.g., RNA or mRNA, are provided below in Scheme 1 through Scheme 11. Scheme 1 provides a general method for phosphorylation of nucleosides, including modified nucleosides.

[chemical structure]

[0257] Various protecting groups may be used to control the reaction. For example, Scheme 2 provides the use of multiple protecting and deprotecting steps to promote phosphorylation at the 5′ position of the sugar, rather than the 2′ and 3′ hydroxyl groups.

[chemical structure]

[0258] Modified nucleotides can be synthesized in any useful manner. Schemes 3, 4, and 7 provide exemplary methods for synthesizing modified nucleotides having a modified purine nucleobase; and Schemes 5 and 6 provide exemplary methods for synthesizing modified nucleotides having a modified pseudouridine or pseudoisocytidine, respectively.

[chemical structure]

[chemical structure]

[chemical structure]

[chemical structure]

[chemical structure]

[0259] Schemes 8 and 9 provide exemplary syntheses of modified nucleotides. Scheme 10 provides a non-limiting biocatalytic method for producing nucleotides.

[chemical structure]

[chemical structure]

[chemical structure]

[0260] Scheme 11 provides an exemplary synthesis of a modified uracil, where the N1 position is modified with R^{12b}, as provided elsewhere, and the 5′-position of ribose is phosphorylated. T¹, T², R^{12a}, R^{12b}, and r are as provided herein. This synthesis, as well as optimized versions thereof, can be used to modify other pyrimidine nucleobases and purine nucleobases (see e.g., Formulas (b1)-(b43)) and/or to install one or more phosphate groups (e.g., at the 5′ position of the sugar). This alkylating reaction can also be used to include one or more optionally substituted alkyl group at any reactive group (e.g., amino group) in any nucleobase described herein (e.g., the amino groups in the Watson-Crick base-pairing face for cytosine, uracil, adenine, and guanine)

[chemical structure]

Combinations of Nucleotides in mRNA

[0261] Further examples of modified nucleotides and modified nucleotide combinations are provided below in Table 2. These combinations of modified nucleotides can be used to form the modified nucleic acids or mRNA of the invention. Unless otherwise noted, the modified nucleotides may be completely substituted for the natural nucleotides of the modified nucleic acids or mRNA of the invention. As a non-limiting example, the natural nucleotide uridine may be substituted with a modified nucleoside described herein. In another non-limiting example, the natural nucleotide uridine may be partially substituted (e.g., about 0.1%, 1%, 5%, 10%, 15%, 20%, 25%, 30%, 35%, 40%, 45%, 50%, 55%, 60%, 65%, 70%, 75%, 80%, 85%, 90%, 95% or 99.9%) with at least one of the modified nucleoside disclosed herein.

TABLE 2

| Modified | |
|---|---|
| Nucleotide | Modified Nucleotide Combination |
| α-thio-cytidine | α-thio-cytidine/5-iodo-uridine |
| | α-thio-cytidine/N1-methyl-pseudo-uridine |
| | α-thio-cytidine/α-thio-uridine |
| | α-thio-cytidine/5-methyl-uridine |
| | α-thio-cytidine/pseudo-uridine |
| | about 50% of the cytosines are α-thio-cytidine |
| pseudoisocytidine | pseudoisocytidine/5-iodo-uridine |
| | pseudoisocytidine/N1-methyl-pseudouridine |
| | pseudoisocytidine/α-thio-uridine |
| | pseudoisocytidine/5-methyl-uridine |
| | pseudoisocytidine/pseudouridine |
| | about 25% of cytosines are pseudoisocytidine |
| | pseudoisocytidine/about 50% of uridines are N1-methyl-pseudouridine |
| | and about 50% of uridines are pseudouridine |
| | pseudoisocytidine/about 25% of uridines are N1-methyl-pseudouridine |
| | and about 25% of uridines are pseudouridine |
| pyrrolo-cytidine | pyrrolo-cytidine/5-iodo-uridine |
| | pyrrolo-cytidine/N1-methyl-pseudouridine |
| | pyrrolo-cytidine/α-thio-uridine |
| | pyrrolo-cytidine/5-methyl-uridine |
| | pyrrolo-cytidine/pseudouridine |
| | about 50% of the cytosines are pyrrolo-cytidine |
| 5-methyl-cytidine | 5-methyl-cytidine/5-iodo-uridine |
| | 5-methyl-cytidine/N1-methyl-pseudouridine |
| | 5-methyl-cytidine/α-thio-uridine |
| | 5-methyl-cytidine/5-methyl-uridine |
| | 5-methyl-cytidine/pseudouridine |
| | about 25% of cytosines are 5-methyl-cytidine |
| | about 50% of cytosines are 5-methyl-cytidine |
| | 5-methyl-cytidine/5-methoxy-uridine |
| | 5-methyl-cytidine/5-bromo-uridine |
| | 5-methyl-cytidine/2-thio-uridine |
| | 5-methyl-cytidine/about 50% of uridines are 2-thio-uridine |
| | about 50% of uridines are 5-methyl-cytidine/about 50% of uridines |
| | are 2-thio-uridine |
| N4-acetyl-cytidine | N4-acetyl-cytidine/5-iodo-uridine |
| | N4-acetyl-cytidine/N1-methyl-pseudouridine |
| | N4-acetyl-cytidine/α-thio-uridine |
| | N4-acetyl-cytidine/5-methyl-uridine |
| | N4-acetyl-cytidine/pseudouridine |
| | about 50% of cytosines are N4-acetyl-cytidine |
| | about 25% of cytosines are N4-acetyl-cytidine |
| | N4-acetyl-cytidine/5-methoxy-uridine |
| | N4-acetyl-cytidine/5-bromo-uridine |
| | N4-acetyl-cytidine/2-thio-uridine |
| | about 50% of cytosines are N4-acetyl-cytidine/about 50% of uridines |
| | are 2-thio-uridine |

[0262] Further examples of modified nucleotide combinations are provided below in Table 3. These combinations of modified nucleotides can be used to form the modified nucleic acid molecules or mRNA of the invention.

TABLE 3

| Modified | |
|---|---|
| Nucleotide | Modified Nucleotide Combination |
| modified cytidine | modified cytidine with (b10)/pseudouridine |
| having one or | modified cytidine with (b10)/N1-methyl-pseudouridine |
| more nucleobases | modified cytidine with (b10)15-methoxy-uridine |
| of Formula (b10) | modified cytidine with (b10)/5-methyl-uridine |
| | modified cytidine with (b10)/5-bromo-uridine |
| | modified cytidine with (b10)/2-thio-uridine |
| | about 50% of cytidine substituted with modified cytidine (b10)/ |
| | about 50% of uridines are 2-thio-uridine |
| modified cytidine | modified cytidine with (b32)/pseudouridine |
| having one or | modified cytidine with (b32)/N1-methyl-pseudouridine |
| more nucleobases | modified cytidine with (b32)/5-methoxy-uridine |
| of Formula (b32) | modified cytidine with (b32)/5-methyl-uridine |
| | modified cytidine with (b32)/5-bromo-uridine |
| | modified cytidine with (b32)/2-thio-uridine |
| | about 50% of cytidine substituted with modified cytidine (b32)/ |
| | about 50% of uridines are 2-thio-uridine |
| modified uridine | modified uridine with (b1)/N4-acetyl-cytidine |
| having one or | modified uridine with (b1)/5-methyl-cytidine |
| more nucleobases | |
| of Formula (b1) | |
| modified uridine | modified uridine with (b8)/N4-acetyl-cytidine |
| having one or | modified uridine with (b8)/5-methyl-cytidine |
| more nucleobases | |
| of Formula (b8) | |
| modified uridine | modified uridine with (b28)/N4-acetyl-cytidine |
| having one or | modified uridine with (b28)/5-methyl-cytidine |
| more nucleobases | |
| of Formula (b28) | |
| modified uridine | modified uridine with (b29)/N4-acetyl-cytidine |
| having one or | modified uridine with (b29)/5-methyl-cytidine |
| more nucleobases | |
| of Formula (b29) | |
| modified uridine | modified uridine with (b30)/N4-acetyl-cytidine |
| having one or | modified uridine with (b30)/5-methyl-cytidine |
| more nucleobases | |
| of Formula (b30) | |

[0263] In some embodiments, at least 25% of the cytosines are replaced by a compound of Formula (b10)-(b14) (e.g., at least about 30%, at least about 35%, at least about 40%, at least about 45%, at least about 50%, at least about 55%, at least about 60%, at least about 65%, at least about 70%, at least about 75%, at least about 80%, at least about 85%, at least about 90%, at least about 95%, or about 100%).

[0264] In some embodiments, at least 25% of the uracils are replaced by a compound of Formula (b1)-(b9) (e.g., at least about 30%, at least about 35%, at least about 40%, at least about 45%, at least about 50%, at least about 55%, at least about 60%, at least about 65%, at least about 70%, at least about 75%, at least about 80%, at least about 85%, at least about 90%, at least about 95%, or about 100%).

[0265] In some embodiments, at least 25% of the cytosines are replaced by a compound of Formula (b10)-(b14), and at least 25% of the uracils are replaced by a compound of Formula (b1)-(b9) (e.g., at least about 30%, at least about 35%, at least about 40%, at least about 45%, at least about 50%, at least about 55%, at least about 60%, at least about 65%, at least about 70%, at least about 75%, at least about 80%, at least about 85%, at least about 90%, at least about 95%, or about 100%).

### Terminal Architecture Modifications: 5′-Capping

[0266] The 5′-cap structure is responsible for binding the mRNA Cap Binding Protein (CBP), which is responsibility for mRNA stability in the cell and translation competency through the association of CBP with poly(A) binding protein to form the mature cyclic mRNA species. The cap further assists the removal of 5′ proximal introns removal during mRNA splicing.

[0267] Endogenous messenger RNA (mRNA) molecules may contain a 5′-cap structure on the 5′-end of a mature mRNA molecule. The 5′-cap contains a 5′-5′-triphosphate linkage between the 5′-most nucleotide and guanine nucleotide. The conjugated guanine nucleotide may be methylated to generate an N7-methyl-guanylate residue. The ribose sugars of the terminal and/or anteterminal transcribed nucleotides of the 5′ end of the mRNA may optionally also be 2′-O-methylated. 5′-decapping through hydrolysis and cleavage of the guanylate cap structure may target a nucleic acid molecule, such as an mRNA molecule, for degradation.

[0268] Modifications to the modified mRNA of the present invention may generate a non-hydrolyzable cap structure preventing decapping and thus increasing mRNA half-life. Because cap structure hydrolysis requires cleavage of 5′-ppp-5′ phosphorodiester linkages, modified nucleotides may be used during the capping reaction. For example, a Vaccinia Capping Enzyme from New England Biolabs (Ipswich, Mass.) may be used with α-thio-guanosine nucleotides according to the manufacturer's instructions to create a phosphorothioate linkage in the 5′-ppp-5′ cap. Additional modified guanosine nucleotides may be used such as α-methyl-phosphonate and seleno-phosphate nucleotides.

[0269] Additional modifications include, but are not limited to, 2′-O-methylation of the ribose sugars of 5′-terminal and/or 5′-anteterminal nucleotides of the mRNA (as mentioned above) on the 2′-hydroxyl group of the sugar ring. Multiple distinct 5′-cap structures can be used to generate the 5′-cap of a synthetic mRNA molecule.

[0270] Cap analogs, which herein are also referred to as synthetic cap analogs, chemical caps, chemical cap analogs, or structural or functional cap analogs, differ from natural (i.e. endogenous, wild-type or physiological) 5′-caps in their chemical structure, while retaining cap function. Cap analogs may be chemically (i.e. non-enzymatically) or enzymatically synthesized and/or linked to a nucleic acid molecule. Many chemical cap analogs are used to co-transcriptionally cap a synthetic mRNA molecule.

[0271] For example, the Anti-Reverse Cap Analog (ARCA) cap contains a 5′-5′-triphosphate guanine-guanine linkage where one guanine contains an N7 methyl group as well as a 3′-O-methyl group (i.e., N7,3′-O-dimethyl-guanosine-5′-triphosphate-5′-guanosine (m⁷G-3′ mppp-G; which may equivalently be designated 3′ O-Me-m7G(5′)ppp(5′)G)). The 3′-O atom of the other, unmodified, guanine becomes linked to the 5′-terminal nucleotide of the capped nucleic acid molecule (e.g. an mRNA or mRNA). The N7- and 3′-O-methlyated guanine provides the terminal moiety of the capped nucleic acid molecule (e.g. mRNA or mRNA).

[0272] Another exemplary cap is mCAP, which is similar to ARCA but has a 2′-O-methyl group on guanosine (i.e., N7,2′-O-dimethyl-guanosine-5′-triphosphate-5′-guanosine, m⁷Gm-ppp-G).

[0273] While cap analogs allow for the concomitant capping of a nucleic acid molecule in an in vitro transcription reaction, up to 20% of transcripts can remain uncapped. This, as well as the structural differences of a cap analog from an endogenous 5′-cap structures of nucleic acids produced by the endogenous, cellular transcription machinery, may lead to reduced translational competency and reduced cellular stability.

[0274] Modified mRNA of the present invention may also be capped post-transcriptionally, using enzymes, in order to generate more authentic 5′-cap structures. As used herein, the phrase “more authentic” refers to a feature that closely mirrors or mimics, either structurally or functionally, an endogenous or wild type feature. That is, a “more authentic” feature is better representative of an endogenous, wild-type, natural or physiological cellular function and/or structure as compared to synthetic features or analogs, etc., of the prior art, or which outperforms the corresponding endogenous, wild-type, natural or physiological feature in one or more respects. Non-limiting examples of more authentic 5′ cap structures of the present invention are those which, among other things, have enhanced binding of cap binding proteins, increased half life, reduced susceptibility to 5′ endonucleases and/or reduced 5′ decapping, as compared to synthetic 5′ cap structures known in the art (or to a wild-type, natural or physiological 5′ cap structure). For example, recombinant Vaccinia Virus Capping Enzyme and recombinant 2′-O-methyltransferase enzyme can create a canonical 5′-5′-triphosphate linkage between the 5′-terminal nucleotide of an mRNA and a guanine cap nucleotide wherein the cap guanine contains an N7 methylation and the 5′-terminal nucleotide of the mRNA contains a 2′-O-methyl. Such a structure is termed the Cap1 structure. This cap results in a higher translational-competency and cellular stability and a reduced activation of cellular pro-inflammatory cytokines, as compared, e.g., to other 5′ cap analog structures known in the art. Cap structures include, but are not limited to, 7mG(5′)ppp(5′)N,pN2p (cap 0), 7mG(5′)ppp(5′)NlmpNp (cap 1), and 7mG(5′)-ppp(5′)N1mpN2 mp (cap 2).

[0275] Because the modified mRNA may be capped post-transcriptionally, and because this process is more efficient, nearly 100% of the modified mRNA may be capped. This is in contrast to ˜80% when a cap analog is linked to an mRNA in the course of an in vitro transcription reaction.

[0276] According to the present invention, 5′ terminal caps may include endogenous caps or cap analogs. According to the present invention, a 5′ terminal cap may comprise a guanine analog. Useful guanine analogs include, but are not limited to, inosine, N1-methyl-guanosine, 2′ fluoro-guanosine, 7-deaza-guanosine, 8-oxo-guanosine, 2-amino-guanosine, LNA-guanosine, and 2-azido-guanosine.

### IRES Sequences

[0277] Further, provided are nucleic acids containing an internal ribosome entry site (IRES). An IRES may act as the sole ribosome binding site, or may serve as one of multiple ribosome binding sites of an mRNA. An mRNA containing more than one functional ribosome binding site may encode several peptides or polypeptides that are translated independently by the ribosomes (“multicistronic mRNA”). When nucleic acids are provided with an IRES, further optionally provided is a second translatable region. Examples of IRES sequences that can be used according to the invention include without limitation, those from picornaviruses (e.g. FMDV), pest viruses (CFFV), polio viruses (PV), encephalomyocarditis viruses (ECMV), foot-and-mouth disease viruses (FMDV), hepatitis C viruses (HCV), classical swine fever viruses (CSFV), murine leukemia virus (MLV), simian immune deficiency viruses (SIV) or cricket paralysis viruses (CrPV).

### Terminal Architecture Modifications: Poly-A Tails

[0278] During RNA processing, a long chain of adenine nucleotides (poly-A tail) is normally added to a messenger RNA (mRNA) molecules to increase the stability of the molecule. Immediately after transcription, the 3′ end of the transcript is cleaved to free a 3′ hydroxyl. Then poly-A polymerase adds a chain of adenine nucleotides to the RNA. The process, called polyadenylation, adds a poly-A tail that is between 100 and 250 residues long.

[0279] It has been discovered that unique poly-A tail lengths provide certain advantages to the modified RNAs of the present invention.

[0280] Generally, the length of a poly-A tail of the present invention is greater than 30 nucleotides in length. In another embodiment, the poly-A tail is greater than 35 nucleotides in length. In another embodiment, the length is at least 40 nucleotides. In another embodiment, the length is at least 45 nucleotides. In another embodiment, the length is at least 55 nucleotides. In another embodiment, the length is at least 60 nucleotides. In another embodiment, the length is at least 60 nucleotides. In another embodiment, the length is at least 80 nucleotides. In another embodiment, the length is at least 90 nucleotides. In another embodiment, the length is at least 100 nucleotides. In another embodiment, the length is at least 120 nucleotides. In another embodiment, the length is at least 140 nucleotides. In another embodiment, the length is at least 160 nucleotides. In another embodiment, the length is at least 180 nucleotides. In another embodiment, the length is at least 200 nucleotides. In another embodiment, the length is at least 250 nucleotides. In another embodiment, the length is at least 300 nucleotides. In another embodiment, the length is at least 350 nucleotides. In another embodiment, the length is at least 400 nucleotides. In another embodiment, the length is at least 450 nucleotides. In another embodiment, the length is at least 500 nucleotides. In another embodiment, the length is at least 600 nucleotides. In another embodiment, the length is at least 700 nucleotides. In another embodiment, the length is at least 800 nucleotides. In another embodiment, the length is at least 900 nucleotides. In another embodiment, the length is at least 1000 nucleotides. In some embodiments, the modified mRNA includes from about 35 to about 3,000 nucleotides (e.g., from 35 to 50, from 35 to 100, from 35 to 250, from 35 to 500, from 30 to 750, from 35 to 1,000, from 35 to 1,500, from 35 to 2,000, from 35 to 2,500, from 50 to 100, from 50 to 250, from 50 to 500, from 50 to 750, from 50 to 1,000, from 50 to 1,500, from 50 to 2,000, from 50 to 2,500, from 50 to 3,000, from 100 to 500, from 100 to 750, from 100 to 1,000, from 100 to 1,500, from 100 to 2,000, from 100 to 2,500, from 100 to 3,000, from 500 to 750, from 500 to 1,000, from 500 to 1,500, from 500 to 2,000, from 500 to 2,500, from 500 to 3,000, from 1,000 to 1,500, from 1,000 to 2,000, from 1,000 to 2,500, from 1,000 to 3,000, from 1,500 to 2,000, from 1,500 to 2,500, from 1,500 to 3,000, from 2,000 to 3,000, from 2,000 to 2,500, and from 2,500 to 3,000).

[0281] In one embodiment, the poly-A tail is designed relative to the length of the overall modified RNA molecule. This design may be based on the length of the coding region of the modified RNA, the length of a particular feature or region of the modified RNA (such as the mRNA), or based on the length of the ultimate product expressed from the modified RNA.

[0282] In this context the poly-A tail may be 10, 20, 30, 40, 50, 60, 70, 80, 90 or 100% greater in length than the modified RNA or feature thereof. The poly-A tail may also be designed as a fraction of the modified RNA to which it belongs. In this context, the poly-A tail may be 10, 20, 30, 40, 50, 60, 70, 80, or 90% or more of the total length of the construct or the total length of the construct minus the poly-A tail. Further, engineered binding sites and conjugation of modified mRNA for Poly-A binding protein may enhance expression.

[0283] Additionally, multiple distinct modified mRNA may be linked together to the PABP (Poly-A binding protein) through the 3′-end using modified nucleotides at the 3′-terminus of the poly-A tail. Transfection experiments can be conducted in relevant cell lines at and protein production can be assayed by ELISA at 12 hour, 24 hour, 48 hour, 72 hour and day 7 post-transfection.

[0284] In one embodiment, the modified mRNA of the present invention are designed to include a polyA-G Quartet. The G-quartet is a cyclic hydrogen bonded array of four guanine nucleotides that can be formed by G-rich sequences in both DNA and RNA. In this embodiment, the G-quartet is incorporated at the end of the poly-A tail. The resultant mRNA molecule is assayed for stability, protein production and other parameters including half-life at various time points. It has been discovered that the polyA-G quartet results in protein production equivalent to at least 75% of that seen using a poly-A tail of 120 nucleotides alone.

### Use of Modified RNAs

[0285] Improvement in Organ, Tissue, or Explant Viability and/or Longevity

[0286] The present invention addresses a long felt need in the fields of organ rescue and transplant. The insults and damage of newly harvested organs and tissues are often rapid and irreversible. The modified mRNAs as described herein may be used to increase the viability or longevity of an organ or tissue explant, or portion thereof. In this manner, the time between harvest and transplant or harvest and study may be increased, affording more opportunity for long distance transplant matches. For example, organs and tissues may be contacted by soaking or injection or injection to the host, with a modified mRNA which encodes a protein which acts as a radical scavenger. In this manner, the organ would suffer less damage and be viable for a longer time. The modified and/or formulated mRNA itself may also act as a radical scavenger.

[0287] Any organ, tissue or portion thereof (e.g., cells) may be administered the compositions of the present invention. Organs may be selected from the heart, lung, brain, liver, basal ganglia, brain stem medulla, midbrain, pons, cerebellum, cerebral cortex, hypothalamus, eye, pituitary, thyroid, parathyroid, esophagus, thymus, adrenal glands, appendix, bladder, gallbladder, large intestine, small intestine, kidney, pancreas, spleen, stomach, skin, prostate, testes, ovaries, or uterus. Tissues may be selected from any of the organs described herein, connective tissues such as, but not limited to, cartilage (e.g., esophageal cartilage, cartilage of the knee, cartilage of the ear, cartilage of the nose), muscle such as, but not limited to, smooth and cardiac (e.g., heart valves), tendons, ligaments, bone (e.g., bone marrow), cornea, middle ear and veins. Any portion of an organ or tissue may also be administered the compositions of the present invention. As a non-limiting example, a portion of the eye such as the cornea may be administered the compositions of the present invention. As another non-limiting example, hair and/or hair follicles may be administered the compositions of the present invention before, during and/or after transplant of skin and/or hair follicles.

[0288] In one embodiment, the entire organ, tissue or portion thereof is administered the compositions of the present invention before transplant. As a non-limiting example, the entire organ, tissue or portion thereof may be administered the compositions of the present invention comprising modified mRNA prior to transplant. As another non-limiting example, part of the organ, tissue or portion thereof may be administered a first composition of the present invention comprising modified mRNA prior to transplant and the other part of the organ, tissue or portion thereof may be administered a second composition. The first and second composition may comprise the same or different modified mRNA. The first and second composition may comprise more than one modified mRNA.

[0289] In one embodiment, the compositions described herein are administered to more than one organ, tissue or portion thereof

[0290] In one embodiment, the compositions described herein may be administered to two organs, tissues or portions thereof. As a non-limiting example, a kidney and pancreas or heart and kidney, or heart and liver or lung and kidney or lung and liver, or heart and lung may be treated with the compositions described herein before, during and/or after transplant into a single recipient. Each organ may be administered the same or different composition.

[0291] In one embodiment, the compositions described herein may be administered to three or more organs, tissues or portions thereof. As a non-limiting example, a heart, liver and kidney or heart, kidney and pancreas or heart, lung and liver may be treated with the compositions described herein before, during and/or after transplant into a single recipient. Each organ may be administered the same or different composition.

[0292] In one embodiment the modified RNA composition comprises a formulated modified mRNA and the formulation may be selected from those described herein including lipids, lipidoids, lipidoids, polymers, liposome formulations, nanoparticles, dynamic polyconjugate formulations, atuplexes, DBTC formulations, PLGA polymers, protamine based agents, cell penetrating peptides, conjugates of sugars or steroids, and cell-based carrier systems.

[0293] In one embodiment, the modified mRNA is administered to a host organism. That host organism may be a donor or recipient host. It may be a mammal and that mammal may be a human. It is also contemplated that the compositions would be useful in veterinary applications or any application in which organ viability (e.g., integrity, or longevity) was desired. Donation does not necessarily suggest that there is a recipient organism. Donation (or harvest) of an organ or tissue may be made in the absence of a recipient.

[0294] In one embodiment, administration to the donor organism occurs either prior to any procedure to remove the organ or tissue, during removal or after removal of the organ or tissue. Administration may be made by soaking, contact, injection, or by delivery to the blood of the donor or recipient. Furthermore, administration may be facilitated at least in part by the use of, or in combination with, a medical device, system or component such as an ex-vivo organ care system.

[0295] In another embodiment, the organ, tissue or portion thereof is administered the compositions of the present invention before transplant and the host is administered a composition of the present invention. The composition administered to the host may be the same or different from the composition the organ, tissue or portion thereof was treated with. The composition administered to the host and the composition administered the organ, tissue or portion thereof may comprise more than one modified mRNA.

[0296] In another embodiment, the compositions described herein may be administered to veins (e.g., femoral and sapenous veins) before, during and/or after transplantation.

[0297] In one embodiment, the compositions described herein are injected into the organ, tissue and/or portion thereof prior to, during and/or after removal from the host. The compositions described herein may be administered to the entire organ, a portion of the organ, entire tissue, portion of the tissue, and/or at least one cell to be transplanted.

[0298] In one embodiment, the fluids used during transplant may comprise compositions comprising modified mRNA. For example, the modified mRNA may be added to fluids used in transplant or fluids which the organ, tissues or portion thereof may contact during the transplant process.

[0299] In one embodiment, the modified nucleic acids described herein may be loaded into cells of the tissues and/or organs using electroporation (e.g., flow electroporation). Methyl transferase inhibitors and/or nucleases may be used to improve viability and enhance transgene expression (see e.g., US20060205081, US20070059833, WO2006089152 and WO2007030674; each of which are herein incorporated by reference in its entirety).

[0300] In one embodiment, the composition comprises formulated modified mRNA administered.

[0301] In one embodiment, the modified mRNA encodes a polypeptide which acts as a radical scavenger or an immunosuppressive agent.

[0302] In one embodiment, the modified mRNA may be encapsulated in hydrogels or sealants prior to administration to the organs, tissues and/or portions thereof. The organs, tissues and/or portions thereof may be administered the sealant containing modified mRNA prior to, during and/or after the transplantation procedure. As a non-limiting example, modified mRNA may be formulated in a sealant or hydrogel and then administered to an organ, tissue and/or portion thereof prior to transplantation. As another non-limiting example, modified mRNA encoding a protein such as a polypeptide of interest is formulated in a sealant or hyrdogel prior to, during and/or after the transplantation procedure.

[0303] In one embodiment the modified mRNA encodes a protein such as a polypeptide of interest. A polypeptide of interest of the present invention may include, but are not limited to, a protein that is a radical scavenger, a protein that is an immunosuppressive agent, protein a4beta1, vascular cell adhesion molecule 1 (VCAM-1), VEGF, neuregulin1 (NRG1) thymosin beta-4 major histocompatibility complex (MHC), human leukocyte antigens (HLA), heat shock proteins (HSP), b-cell leukemia/lymphoma-2 (BCL-2), nitric oxide synthase (NOS), interleukin-4, interleukin-10, transforming growth factor beta-1 (TGF-β1), heme oxygenzse 1 (HO-1 or HMOX1), killer cell immunoglobin receptor (KIR), natural killer cell (NK), a protein kinase C (PKC) inhibitor and the targets listed in Table 4.

### Target Selection

[0304] According to the present invention, the modified nucleic acids comprise at least a first region of linked nucleosides encoding at least one polypeptide of interest. Non-limiting examples of the polypeptides of interest or “Targets” of the present invention are listed in Table 4. Shown in Table 4, in addition to the description of the gene encoding the polypeptide of interest are the National Center for Biotechnology Information (NCBI) nucleotide reference ID (NM Ref) and the NCBI peptide reference ID (NP Ref). For any particular gene there may exist one or more variants or isoforms. Where these exist, they are shown in the table as well. It will be appreciated by those of skill in the art that disclosed in the Table are potential flanking regions. These are encoded in each nucleotide sequence either to the 5′ (upstream) or 3′ (downstream) of the open reading frame. The open reading frame is definitively and specifically disclosed by teaching the nucleotide reference sequence. Consequently, the sequences taught flanking that encoding the protein are considered flanking regions. It is also possible to further characterize the 5′ and 3′ flanking regions by utilizing one or more available databases or algorithms. Databases have annotated the features contained in the flanking regions of the NCBI sequences and these are available in the art.

TABLE 4
Targets

| | | | SEQ | | SEQ |
|---|---|---|---|---|---|
| Target | | | ID | | ID |
| No. | Description | NM Ref. | NO | NP Ref. | NO |
| 1 | Homo sapiens thymosin beta 4, X- | NM_021109.3 | 1 | NP_066932.1 | 127 |
| | linked (TMSB4X), mRNA | | | | |
| 2 | Homo sapiens thymosin beta 4, Y- | NM_004202.2 | 2 | NP_004193.1 | 128 |
| | linked (TMSB4Y), mRNA | | | | |
| 3 | Homo sapiens neuregulin 1 (NRG1), | NM_001160008.1 | 3 | NP_001153480.1 | 129 |
| | transcript variant HRG-beta2b, | | | | |
| | mRNA | | | | |
| 4 | Homo sapiens neuregulin 1 (NRG1), | NM_001160005.1 | 4 | NP_001153477.1 | 130 |
| | transcript variant HRG-beta3b, | | | | |
| | mRNA | | | | |
| 5 | Homo sapiens neuregulin 1 (NRG1), | NM_001160002.1 | 5 | NP_001153474.1 | 131 |
| | transcript variant HRG-gamma2, | | | | |
| | mRNA | | | | |
| 6 | Homo sapiens neuregulin 1 (NRG1), | NM_001159999.1 | 6 | NP_001153471.1 | 132 |
| | transcript variant HRG-beta1b, | | | | |
| | mRNA | | | | |
| 7 | Homo sapiens neuregulin 1 (NRG1), | NM_001159995.1 | 7 | NP_001153467.1 | 133 |
| | transcript variant HRG-beta1c, | | | | |
| | mRNA | | | | |
| 8 | Homo sapiens neuregulin 1 (NRG1), | NM_001159995.1 | 8 | NP_001153467.1 | 134 |
| | transcript variant HRG-beta1c, | | | | |
| | mRNA | | | | |
| 9 | Homo sapiens neuregulin 1 (NRG1), | NM_013957.3 | 9 | NP_039251.2 | 135 |
| | transcript variant HRG-beta2, mRNA | | | | |
| 10 | Homo sapiens neuregulin 1 (NRG1), | NM_013957.3 | 10 | NP_039251.2 | 136 |
| | transcript variant HRG-beta2, mRNA | | | | |
| 11 | Homo sapiens neuregulin 1 (NRG1), | NM_004495.3 | 11 | NP_004486.2 | 137 |
| | transcript variant HRG-gamma, | | | | |
| | mRNA | | | | |
| 12 | Homo sapiens neuregulin 1 (NRG1), | NM_013959.3 | 12 | NP_039253.1 | 138 |
| | transcript variant SMDF, mRNA | | | | |
| 13 | Homo sapiens neuregulin 1 (NRG1), | NM_013962.2 | 13 | NP_039256.2 | 139 |
| | transcript variant GGF2, mRNA | | | | |
| 14 | Homo sapiens neuregulin 1 (NRG1), | NM_001160007.1 | 14 | NP_001153479.1 | 140 |
| | transcript variant HRG-gamma3, | | | | |
| | mRNA | | | | |
| 15 | Homo sapiens neuregulin 1 (NRG1), | NM_001160004.1 | 15 | NP_001153476.1 | 141 |
| | transcript variant ndf43b, mRNA | | | | |
| 16 | Homo sapiens neuregulin 1 (NRG1), | NM_001160001.1 | 16 | NP_001153473.1 | 142 |
| | transcript variant HRG-beta1d, | | | | |
| | mRNA | | | | |
| 17 | Homo sapiens neuregulin 1 (NRG1), | NM_001159996.1 | 17 | NP_001153468.1 | 143 |
| | transcript variant ndf43c, mRNA | | | | |
| 18 | Homo sapiens neuregulin 1 (NRG1), | NM_013958.3 | 18 | NP_039252.2 | 144 |
| | transcript variant HRG-beta3, mRNA | | | | |
| 19 | Homo sapiens neuregulin 1 (NRG1), | NM_013956.3 | 19 | NP_039250.2 | 145 |
| | transcript variant HRG-beta1, mRNA | | | | |
| 20 | Homo sapiens neuregulin 1 (NRG1), | NM_013964.3 | 20 | NP_039258.1 | 146 |
| | transcript variant HRG-alpha, mRNA | | | | |
| 21 | Homo sapiens neuregulin 1 (NRG1), | NM_013960.3 | 21 | NP_039254.1 | 147 |
| | transcript variant ndf43, mRNA | | | | |
| 22 | Homo sapiens vascular endothelial | NM_001171623.1 | 22 | NP_001165094.1 | 148 |
| | growth factor A (VEGFA), transcript | | | | |
| | variant 1, mRNA | | | | |
| 23 | Homo sapiens vascular endothelial | NM_001025366.2 | 23 | NP_001020537.2 | 149 |
| | growth factor A (VEGFA), transcript | | | | |
| | variant 1, mRNA | | | | |
| 24 | Homo sapiens vascular endothelial | NM_001171624.1 | 24 | NP_001165095.1 | 150 |
| | growth factor A (VEGFA), transcript | | | | |
| | variant 2, mRNA | | | | |
| 25 | Homo sapiens vascular endothelial | NM_003376.5 | 25 | NP_003367.4 | 151 |
| | growth factor A (VEGFA), transcript | | | | |
| | variant 2, mRNA | | | | |
| 26 | Homo sapiens vascular endothelial | NM_001171625.1 | 26 | NP_001165096.1 | 152 |
| | growth factor A (VEGFA), transcript | | | | |
| | variant 3, mRNA | | | | |
| 27 | Homo sapiens vascular endothelial | NM_001025367.2 | 27 | NP_001020538.2 | 153 |
| | growth factor A (VEGFA), transcript | | | | |
| | variant 3, mRNA | | | | |
| 28 | Homo sapiens vascular endothelial | NM_001171626.1 | 28 | NP_001165097.1 | 154 |
| | growth factor A (VEGFA), transcript | | | | |
| | variant 4, mRNA | | | | |
| 29 | Homo sapiens vascular endothelial | NM_001025368.2 | 29 | NP_001020539.2 | 155 |
| | growth factor A (VEGFA), transcript | | | | |
| | variant 4, mRNA | | | | |
| 30 | Homo sapiens vascular endothelial | NM_001171627.1 | 30 | NP_001165098.1 | 156 |
| | growth factor A (VEGFA), transcript | | | | |
| | variant 5, mRNA | | | | |
| 31 | Homo sapiens vascular endothelial | NM_001025369.2 | 31 | NP_001020540.2 | 157 |
| | growth factor A (VEGFA), transcript | | | | |
| | variant 5, mRNA | | | | |
| 32 | Homo sapiens vascular endothelial | NM_001171628.1 | 32 | NP_001165099.1 | 158 |
| | growth factor A (VEGFA), transcript | | | | |
| | variant 6, mRNA | | | | |
| 33 | Homo sapiens vascular endothelial | NM_001025370.2 | 33 | NP_001020541.2 | 159 |
| | growth factor A (VEGFA), transcript | | | | |
| | variant 6, mRNA | | | | |
| 34 | Homo sapiens vascular endothelial | NM_001171629.1 | 34 | NP_001165100.1 | 160 |
| | growth factor A (VEGFA), transcript | | | | |
| | variant 7, mRNA | | | | |
| 35 | Homo sapiens vascular endothelial | NM_001033756.2 | 35 | NP_001028928.1 | 161 |
| | growth factor A (VEGFA), transcript | | | | |
| | variant 7, mRNA | | | | |
| 36 | Homo sapiens vascular endothelial | NM_001171630.1 | 36 | NP_001165101.1 | 162 |
| | growth factor A (VEGFA), transcript | | | | |
| | variant 8, mRNA | | | | |
| 37 | Homo sapiens vascular endothelial | NM_001171622.1 | 37 | NP_001165093.1 | 163 |
| | growth factor A (VEGFA), transcript | | | | |
| | variant 8, mRNA | | | | |
| 38 | Homo sapiens vascular endothelial | NM_001204385.1 | 38 | NP_001191314.1 | 164 |
| | growth factor A (VEGFA), transcript | | | | |
| | variant 9, mRNA | | | | |
| 39 | Homo sapiens vascular endothelial | NM_001204385.1 | 39 | NP_001191314.1 | 165 |
| | growth factor A (VEGFA), transcript | | | | |
| | variant 9, mRNA | | | | |
| 40 | Homo sapiens vascular endothelial | NM_001204384.1 | 40 | NP_001191313.1 | 166 |
| | growth factor A (VEGFA), transcript | | | | |
| | variant 9, mRNA | | | | |
| 41 | Homo sapiens vascular endothelial | NM_001243733.1 | 41 | NP_001230662.1 | 167 |
| | growth factor B (VEGFB), transcript | | | | |
| | variant VEGFB-167, mRNA | | | | |
| 42 | Homo sapiens vascular endothelial | NM_005429.2 | 42 | NP_005420.1 | 168 |
| | growth factor C (VEGFC), mRNA | | | | |
| 43 | Homo sapiens vascular endothelial | NM_003377.4 | 43 | NP_003368.1 | 169 |
| | growth factor B (VEGFB), transcript | | | | |
| | variant VEGFB-186, mRNA | | | | |
| 44 | Homo sapiens vascular cell adhesion | NM_001078.3 | 44 | NP_001069.1 | 170 |
| | molecule 1 (VCAM1), transcript | | | | |
| | variant 1, mRNA | | | | |
| 45 | Homo sapiens vascular cell adhesion | NM_080682.2 | 45 | NP_542413.1 | 171 |
| | molecule 1 (VCAM1), transcript | | | | |
| | variant 2, mRNA | | | | |
| 46 | Homo sapiens vascular cell adhesion | NM_001199834.1 | 46 | NP_001186763.1 | 172 |
| | molecule 1 (VCAM1), transcript | | | | |
| | variant 3, mRNA | | | | |
| 47 | Homo sapiens major | NM_002124.3 | 47 | NP_002115.2 | 173 |
| | histocompatibility complex, class II, | | | | |
| | DR beta 1 (HLA-DRB1), transcript | | | | |
| | variant 1, mRNA | | | | |
| 48 | Homo sapiens major | NM_002117.5 | 48 | NP_002108.4 | 174 |
| | histocompatibility complex, class I, C | | | | |
| | (HLA-C), transcript variant 1, mRNA | | | | |
| 49 | Homo sapiens major | NM_002116.7 | 49 | NP_002107.3 | 175 |
| | histocompatibility complex, class I, A | | | | |
| | (HLA-A), transcript variant 1, mRNA | | | | |
| 50 | Homo sapiens major | NM_005514.6 | 50 | NP_005505.2 | 176 |
| | histocompatibility complex, class I, B | | | | |
| | (HLA-B), mRNA | | | | |
| 51 | Homo sapiens major | NM_001243965.1 | 51 | NP_001230894.1 | 177 |
| | histocompatibility complex, class II, | | | | |
| | DR beta 1 (HLA-DRB1), transcript | | | | |
| | variant 2, mRNA | | | | |
| 52 | Homo sapiens major | NM_001243042.1 | 52 | NP_001229971.1 | 178 |
| | histocompatibility complex, class I, C | | | | |
| | (HLA-C), transcript variant 2, mRNA | | | | |
| 53 | Homo sapiens major | NM_001242758.1 | 53 | NP_001229687.1 | 179 |
| | histocompatibility complex, class I, A | | | | |
| | (HLA-A), transcript variant 2, mRNA | | | | |
| 54 | Homo sapiens major | NM_005516.5 | 54 | NP_005507.3 | 180 |
| | histocompatibility complex, class I, E | | | | |
| | (HLA-E), mRNA | | | | |
| 55 | Homo sapiens major | NM_002125.3 | 55 | NP_002116.2 | 181 |
| | histocompatibility complex, class II, | | | | |
| | DR beta 5 (HLA-DRB5), mRNA | | | | |
| 56 | Homo sapiens major | NM_020056.4 | 56 | NP_064440.1 | 182 |
| | histocompatibility complex, class II, | | | | |
| | DQ alpha 2 (HLA-DQA2), mRNA | | | | |
| 57 | Homo sapiens major | NM_022555.3 | 57 | NP_072049.2 | 183 |
| | histocompatibility complex, class II, | | | | |
| | DR beta 3 (HLA-DRB3), mRNA | | | | |
| 58 | Homo sapiens major | NM_001242524.1 | 58 | NP_001229453.1 | 184 |
| | histocompatibility complex, class II, | | | | |
| | DP alpha 1 (HLA-DPA1), transcript | | | | |
| | variant 2, mRNA | | | | |
| 59 | Homo sapiens major | NM_001242525.1 | 59 | NP_001229454.1 | 185 |
| | histocompatibility complex, class II, | | | | |
| | DP alpha 1 (HLA-DPA1), transcript | | | | |
| | variant 3, mRNA | | | | |
| 60 | Homo sapiens CD74 molecule, major | NM_001025159.2 | 60 | NP_001020330.1 | 186 |
| | histocompatibility complex, class II | | | | |
| | invariant chain (CD74), transcript | | | | |
| | variant 1, mRNA | | | | |
| 61 | Homo sapiens major | NM_002121.5 | 61 | NP_002112.3 | 187 |
| | histocompatibility complex, class II, | | | | |
| | DP beta 1 (HLA-DPB1), mRNA | | | | |
| 62 | Homo sapiens major | NM_019111.4 | 62 | NP_061984.2 | 188 |
| | histocompatibility complex, class II, | | | | |
| | DR alpha (HLA-DRA), mRNA | | | | |
| 63 | Homo sapiens major | NM_002119.3 | 63 | NP_002110.1 | 189 |
| | histocompatibility complex, class II, | | | | |
| | DO alpha (HLA-DOA), mRNA | | | | |
| 64 | Homo sapiens major | NM_001198858.1 | 64 | NP_001185787.1 | 190 |
| | histocompatibility complex, class II, | | | | |
| | DQ beta 2 (HLA-DQB2), mRNA | | | | |
| 65 | Homo sapiens major | NM_001195000.1 | 65 | NP_001181929.1 | 191 |
| | histocompatibility complex, class I- | | | | |
| | related (MR1), transcript variant 3, | | | | |
| | mRNA | | | | |
| 66 | Homo sapiens major | NM_001194999.1 | 66 | NP_001181928.1 | 192 |
| | histocompatibility complex, class I- | | | | |
| | related (MR1), transcript variant 2, | | | | |
| | mRNA | | | | |
| 67 | Homo sapiens major | NM_002118.4 | 67 | NP_002109.2 | 193 |
| | histocompatibility complex, class II, | | | | |
| | DM beta (HLA-DMB), mRNA | | | | |
| 68 | Homo sapiens major | NM_001195035.1 | 68 | NP_001181964.1 | 194 |
| | histocompatibility complex, class I- | | | | |
| | related (MR1), transcript variant 4, | | | | |
| | mRNA | | | | |
| 69 | Homo sapiens major | NM_001531.2 | 69 | NP_001522.1 | 195 |
| | histocompatibility complex, class I- | | | | |
| | related (MR1), transcript variant 1, | | | | |
| | mRNA | | | | |
| 70 | Homo sapiens major | NM_021983.4 | 70 | NP_068818.4 | 196 |
| | histocompatibility complex, class II, | | | | |
| | DR beta 4 (HLA-DRB4), mRNA | | | | |
| 71 | Homo sapiens major | NM_002122.3 | 71 | NP_002113.2 | 197 |
| | histocompatibility complex, class II, | | | | |
| | DQ alpha 1 (HLA-DQA1), mRNA | | | | |
| 72 | Homo sapiens major | NM_002123.4 | 72 | NP_002114.3 | 198 |
| | histocompatibility complex, class II, | | | | |
| | DQ beta 1 (HLA-DQB1), transcript | | | | |
| | variant 1, mRNA | | | | |
| 73 | Homo sapiens major | NM_001243961.1 | 73 | NP_001230890.1 | 199 |
| | histocompatibility complex, class II, | | | | |
| | DQ beta 1 (HLA-DQB1), transcript | | | | |
| | variant 2, mRNA | | | | |
| 74 | Homo sapiens major | NM_001243962.1 | 74 | NP_001230891.1 | 200 |
| | histocompatibility complex, class II, | | | | |
| | DQ beta 1 (HLA-DQB1), transcript | | | | |
| | variant 3, mRNA | | | | |
| 75 | Homo sapiens major | NM_002120.3 | 75 | NP_002111.1 | 201 |
| | histocompatibility complex, class II, | | | | |
| | DO beta (HLA-DOB), mRNA | | | | |
| 76 | Homo sapiens major | NM_033554.3 | 76 | NP_291032.2 | 202 |
| | histocompatibility complex, class II, | | | | |
| | DP alpha 1 (HLA-DPA1), transcript | | | | |
| | variant 1, mRNA | | | | |
| 77 | Homo sapiens major | NM_006120.3 | 77 | NP_006111.2 | 203 |
| | histocompatibility complex, class II, | | | | |
| | DM alpha (HLA-DMA), mRNA | | | | |
| 78 | Homo sapiens major | NM_018950.2 | 78 | NP_061823.2 | 204 |
| | histocompatibility complex, class I, F | | | | |
| | (HLA-F), transcript variant 2, mRNA | | | | |
| 79 | Homo sapiens major | NM_001098479.1 | 79 | NP_001091949.1 | 205 |
| | histocompatibility complex, class I, F | | | | |
| | (HLA-F), transcript variant 1, mRNA | | | | |
| 80 | Homo sapiens major | NM_001098478.1 | 80 | NP_001091948.1 | 206 |
| | histocompatibility complex, class I, F | | | | |
| | (HLA-F), transcript variant 3, mRNA | | | | |
| 81 | Homo sapiens major | NM_002127.5 | 81 | NP_002118.1 | 207 |
| | histocompatibility complex, class I, G | | | | |
| | (HLA-G), mRNA | | | | |
| 82 | Homo sapiens heat shock 27 kDa | NM_001540.3 | 82 | NP_001531.1 | 208 |
| | protein 1 (HSPB1), mRNA | | | | |
| 83 | Homo sapiens heat shock protein | NM_005348.3 | 83 | NP_005339.3 | 209 |
| | 90 kDa alpha (cytosolic), class A | | | | |
| | member 1 (HSP90AA1), transcript | | | | |
| | variant 2, mRNA | | | | |
| 84 | Homo sapiens heat shock protein, | NM_144617.2 | 84 | NP_653218.1 | 210 |
| | alpha-crystallin-related, B6 (HSPB6), | | | | |
| | mRNA | | | | |
| 85 | Homo sapiens heat shock protein | NM_001017963.2 | 85 | NP_01017963.2 | 211 |
| | 90 kDa alpha (cytosolic), class A | | | | |
| | member 1 (HSP90AA1), transcript | | | | |
| | variant 1, mRNA | | | | |
| 86 | Homo sapiens heat shock protein | NM_007355.2 | 86 | NP_031381.2 | 212 |
| | 90 kDa alpha (cytosolic), class B | | | | |
| | member 1 (HSP90AB1), mRNA | | | | |
| 87 | Homo sapiens heat shock 10 kDa | NM_002157.2 | 87 | NP_002148.1 | 213 |
| | protein 1 (chaperonin 10) (HSPE1), | | | | |
| | nuclear gene encoding mitochondrial | | | | |
| | protein, mRNA | | | | |
| 88 | Homo sapiens heat shock 70 kDa | NM_005346.4 | 88 | NP_005337.2 | 214 |
| | protein 1B (HSPA1B), mRNA | | | | |
| 89 | Homo sapiens heat shock 70 kDa | NM_005345.5 | 89 | NP_005336.3 | 215 |
| | protein 1A (HSPA1A), mRNA | | | | |
| 90 | Homo sapiens heat shock | NM_006644.2 | 90 | NP_006635.2 | 216 |
| | 105 kDa/110 kDa protein 1 | | | | |
| | (HSPH1), mRNA | | | | |
| 91 | Homo sapiens heat shock 70 kDa | NM_021979.3 | 91 | NP_068814.2 | 217 |
| | protein 2 (HSPA2), mRNA | | | | |
| 92 | Homo sapiens heat shock 27 kDa | NM_006308.2 | 92 | NP_006299.1 | 218 |
| | protein 3 (HSPB3), mRNA | | | | |
| 93 | Homo sapiens B-cell CLL/lymphoma | NM_000633.2 | 93 | NP_000624.2 | 219 |
| | 2 (BCL2), nuclear gene encoding | | | | |
| | mitochondrial protein, transcript | | | | |
| | variant alpha, mRNA | | | | |
| 94 | Homo sapiens B-cell CLL/lymphoma | NM_000657.2 | 94 | NP_000648.2 | 220 |
| | 2 (BCL2), nuclear gene encoding | | | | |
| | mitochondrial protein, transcript | | | | |
| | variant beta, mRNA | | | | |
| 95 | Homo sapiens nitric oxide synthase 3 | NM_001160110.1 | 95 | NP_001153582.1 | 221 |
| | (endothelial cell) (NOS3), transcript | | | | |
| | variant 3, mRNA | | | | |
| 96 | Homo sapiens nitric oxide synthase 3 | NM_000603.4 | 96 | NP_000594.2 | 222 |
| | (endothelial cell) (NOS3), transcript | | | | |
| | variant 1, mRNA | | | | |
| 97 | Homo sapiens nitric oxide synthase 3 | NM_001160111.1 | 97 | NP_001153583.1 | 223 |
| | (endothelial cell) (NOS3), transcript | | | | |
| | variant 4, mRNA | | | | |
| 98 | Homo sapiens nitric oxide synthase 3 | NM_001160109.1 | 98 | NP_001153581 | 224 |
| | (endothelial cell) (NOS3), transcript | | | | |
| | variant 2, mRNA | | | | |
| 99 | Homo sapiens nitric oxide synthase 1 | NM_001204218.1 | 99 | NP_001191147.1 | 225 |
| | (neuronal) (NOS1), transcript variant | | | | |
| | 2, mRNA | | | | |
| 100 | Homo sapiens nitric oxide synthase 1 | NM_000620.4 | 100 | NP_000611.1 | 226 |
| | (neuronal) (NOS1), transcript variant | | | | |
| | 1, mRNA | | | | |
| 101 | Homo sapiens nitric oxide synthase 1 | NM_001204214.1 | 101 | NP_001191143.1 | 227 |
| | (neuronal) (NOS1), transcript variant | | | | |
| | 4, mRNA | | | | |
| 102 | Homo sapiens nitric oxide synthase 1 | NM_001204213.1 | 102 | NP_001191142.1 | 228 |
| | (neuronal) (NOS1), transcript variant | | | | |
| | 3, mRNA | | | | |
| 103 | Homo sapiens nitric oxide synthase 2, | NM_000625.4 | 103 | NP_000616.3 | 229 |
| | inducible (NOS2), mRNA | | | | |
| 104 | Homo sapiens interleukin 4 (IL4), | NM_000589.3 | 104 | NP_000580.1 | 230 |
| | transcript variant 1, mRNA | | | | |
| 105 | Homo sapiens interleukin 4 (IL4), | NM_172348.2 | 105 | NP_758858.1 | 231 |
| | transcript variant 2, mRNA | | | | |
| 106 | Homo sapiens interleukin 10 (IL10), | NM_000572.2 | 106 | NP_000563.1 | 232 |
| | mRNA | | | | |
| 107 | Homo sapiens transforming growth | NM_000660.4 | 107 | NP_000651.3 | 233 |
| | factor, beta 1 (TGFB1), mRNA | | | | |
| 108 | Homo sapiens heme oxygenase | NM_002133.2 | 108 | NP_002124.1 | 234 |
| | (decycling) 1 (HMOX1), mRNA | | | | |
| 109 | Homo sapiens killer cell | NM_014219.2 | 109 | NP_055034.2 | 235 |
| | immunoglobulin-like receptor, two | | | | |
| | domains, long cytoplasmic tail, 2 | | | | |
| | (KIR2DL2), mRNA | | | | |
| 110 | Homo sapiens killer cell | NM_012312.2 | 110 | NP_036444.1 | 236 |
| | immunoglobulin-like receptor, two | | | | |
| | domains, short cytoplasmic tail, 2 | | | | |
| | (KIR2DS2), mRNA | | | | |
| 111 | Homo sapiens killer cell | NM_015868.2 | 111 | NP_056952.2 | 237 |
| | immunoglobulin-like receptor, two | | | | |
| | domains, long cytoplasmic tail, 3 | | | | |
| | (KIR2DL3), mRNA | | | | |
| 112 | Homo sapiens killer cell | NM_014513.2 | 112 | NP_055328.2 | 238 |
| | immunoglobulin-like receptor, two | | | | |
| | domains, short cytoplasmic tail, 5 | | | | |
| | (KIR2DS5), mRNA | | | | |
| 113 | Homo sapiens killer cell | NM_001080770.1 | 113 | NP_001074239.1 | 239 |
| | immunoglobulin-like receptor, two | | | | |
| | domains, long cytoplasmic tail, 4 | | | | |
| | (KIR2DL4), transcript variant 3, | | | | |
| | mRNA | | | | |
| 114 | Homo sapiens killer cell | NM_006737.3 | 114 | NP_006728.2 | 240 |
| | immunoglobulin-like receptor, three | | | | |
| | domains, long cytoplasmic tail, 2 | | | | |
| | (KIR3DL2), transcript variant 1, | | | | |
| | mRNA | | | | |
| 115 | Homo sapiens killer cell | NM_153443.3 | 115 | NP_703144.2 | 241 |
| | immunoglobulin-like receptor, three | | | | |
| | domains, long cytoplasmic tail, 3 | | | | |
| | (KIR3DL3), mRNA | | | | |
| 116 | Homo sapiens killer cell | NM_014218.2 | 116 | NP_055033.2 | 242 |
| | immunoglobulin-like receptor, two | | | | |
| | domains, long cytoplasmic tail, 1 | | | | |
| | (KIR2DL1), mRNA | | | | |
| 117 | Homo sapiens killer cell | NM_014512.1 | 117 | NP_055327.1 | 243 |
| | immunoglobulin-like receptor, two | | | | |
| | domains, short cytoplasmic tail, 1 | | | | |
| | (KIR2DS1), mRNA | | | | |
| 118 | Homo sapiens killer cell | NM_013289.2 | 118 | NP_037421.2 | 244 |
| | immunoglobulin-like receptor, three | | | | |
| | domains, long cytoplasmic tail, 1 | | | | |
| | (KIR3DL1), mRNA | | | | |
| 119 | Homo sapiens killer cell | NM_012314.3 | 119 | NP_036446.3 | 245 |
| | immunoglobulin-like receptor, two | | | | |
| | domains, short cytoplasmic tail, 4 | | | | |
| | (KIR2DS4), mRNA | | | | |
| 120 | Homo sapiens killer cell | NM_020535.3 | 120 | NP_065396.1 | 246 |
| | immunoglobulin-like receptor, two | | | | |
| | domains, long cytoplasmic tail, 5A | | | | |
| | (KIR2DL5A), mRNA | | | | |
| 121 | Homo sapiens killer cell | NM_001080772.1 | 121 | NP_001074241.1 | 247 |
| | immunoglobulin-like receptor, two | | | | |
| | domains, long cytoplasmic tail, 4 | | | | |
| | (KIR2DL4), transcript variant 2, | | | | |
| | mRNA | | | | |
| 122 | Homo sapiens killer cell | NM_002255.5 | 122 | NP_002246.5 | 248 |
| | immunoglobulin-like receptor, two | | | | |
| | domains, long cytoplasmic tail, 4 | | | | |
| | (KIR2DL4), transcript variant 1, | | | | |
| | mRNA | | | | |
| 123 | Homo sapiens killer cell | NM_001083539.1 | 123 | NP_001077008.1 | 249 |
| | immunoglobulin-like receptor, three | | | | |
| | domains, short cytoplasmic tail, 1 | | | | |
| | (KIR3DS1), mRNA | | | | |
| 124 | Homo sapiens killer cell | NM_001018081.1 | 124 | NP_001018091.1 | 250 |
| | immunoglobulin-like receptor, two | | | | |
| | domains, long cytoplasmic tail, 5B | | | | |
| | (KIR2DL5B), mRNA | | | | |
| 125 | Homo sapiens killer cell | NM_001242867.1 | 125 | NP_001229796.1 | 251 |
| | immunoglobulin-like receptor, three | | | | |
| | domains, long cytoplasmic tail, 2 | | | | |
| | (KIR3DL2), transcript variant 2, | | | | |
| | mRNA | | | | |
| 126 | Homo sapiens killer cell | NM_012313.1 | 126 | NP_036445.1 | 252 |
| | immunoglobulin-like receptor, two | | | | |
| | domains, short cytoplasmic tail, 3 | | | | |
| | (KIR2DS3), mRNA | | | | |

### Prevention or Reduction of Innate Cellular Immune Response Activation

[0305] The modified nucleic acid molecules, e.g., mRNA, described herein, decrease the innate immune response in a cell. The term “innate immune response” includes a cellular response to exogenous single stranded nucleic acids, generally of viral or bacterial origin, which involves the induction of cytokine expression and release, particularly the interferons, and cell death. Protein synthesis is also reduced during the innate cellular immune response. While it is advantageous to eliminate the innate immune response in a cell, the invention provides modified mRNAs that substantially reduce the immune response, including interferon signaling, without entirely eliminating such a response. In some embodiments, the immune response is reduced by 10%, 20%, 30%, 40%, 50%, 60%, 70%, 80%, 90%, 95%, 99%, 99.9%, or greater than 99.9% as compared to the immune response induced by a corresponding unmodified nucleic acid. Such a reduction can be measured by expression or activity level of Type 1 interferons or the expression of interferon-regulated genes such as the toll-like receptors (e.g., TLR7 and TLR8). Reduction of innate immune response can also be measured by decreased cell death following one or more administrations of modified RNAs to a cell population; e.g., cell death is 10%, 25%, 50%, 75%, 85%, 90%, 95%, or over 95% less than the cell death frequency observed with a corresponding unmodified nucleic acid. Moreover, cell death may affect fewer than 50%, 40%, 30%, 20%, 10%, 5%, 1%, 0.1%, 0.01% or fewer than 0.01% of cells contacted with the modified nucleic acids.

[0306] The present disclosure provides for the repeated introduction (e.g., transfection) of modified nucleic acids into a target cell population, e.g., in vitro, ex vivo, or in vivo. The step of contacting the cell population may be repeated one or more times (such as two, three, four, five or more than five times). In some embodiments, the step of contacting the cell population with the modified nucleic acids is repeated a number of times sufficient such that a predetermined efficiency of protein translation in the cell population is achieved. Given the reduced cytotoxicity of the target cell population provided by the nucleic acid modifications, such repeated transfections are achievable in a diverse array of cell types.

[0307] The modified nucleic acids of the invention, including the combination of modifications taught herein may have superior properties making them more suitable as therapeutic modalities.

### Therapeutic Agents

[0308] The modified nucleic acids (modified RNAs) and the proteins translated from the modified nucleic acids described herein can be used as therapeutic agents. For example, a modified nucleic acid described herein can be administered to a subject, wherein the modified nucleic acid is translated in vivo to produce a therapeutic peptide in the subject. Provided are compositions, methods, kits, and reagents for treatment or prevention of disease or conditions in humans and other mammals. The active therapeutic agents of the invention include modified nucleic acids, cells containing modified nucleic acids or polypeptides translated from the modified nucleic acids, polypeptides translated from modified nucleic acids, and cells contacted with cells containing modified nucleic acids or polypeptides translated from the modified nucleic acids.

[0309] In certain embodiments, provided are combination therapeutics containing one or more modified nucleic acids containing translatable regions that encode for a protein or proteins that boost a mammalian subject's immunity along with a protein that induces antibody-dependent cellular toxitity. For example, provided are therapeutics containing one or more nucleic acids that encode trastuzumab and granulocyte-colony stimulating factor (G-CSF). In particular, such combination therapeutics are useful in Her2+ breast cancer patients who develop induced resistance to trastuzumab. (See, e.g., Albrecht, Immunotherapy. 2(6):795-8 (2010); herein incorporated by reference in its entirety).

[0310] Provided are methods of inducing translation of a recombinant polypeptide in a cell population using the modified nucleic acids described herein. Such translation can be in vivo, ex vivo, in culture, or in vitro. The cell population is contacted with an effective amount of a composition containing a nucleic acid that has at least one nucleoside modification, and a translatable region encoding the recombinant polypeptide. The population is contacted under conditions such that the nucleic acid is localized into one or more cells of the cell population and the recombinant polypeptide is translated in the cell from the nucleic acid.

[0311] An effective amount of the composition is provided based, at least in part, on the target tissue, target cell type, means of administration, physical characteristics of the nucleic acid (e.g., size, and extent of modified nucleosides), and other determinants. In general, an effective amount of the composition provides efficient protein production in the cell, preferably more efficient than a composition containing a corresponding unmodified nucleic acid. Increased efficiency may be demonstrated by increased cell transfection (i.e., the percentage of cells transfected with the nucleic acid), increased protein translation from the nucleic acid, decreased nucleic acid degradation (as demonstrated, e.g., by increased duration of protein translation from a modified nucleic acid), or reduced innate immune response of the host cell.

[0312] Aspects of the invention are directed to methods of inducing in vivo translation of a recombinant polypeptide in a mammalian subject in need thereof. Therein, an effective amount of a composition containing a nucleic acid that has at least one nucleoside modification and a translatable region encoding the recombinant polypeptide is administered to the subject using the delivery methods described herein. The nucleic acid is provided in an amount and under other conditions such that the nucleic acid is localized into a cell of the subject and the recombinant polypeptide is translated in the cell from the nucleic acid. The cell in which the nucleic acid is localized, or the tissue in which the cell is present, may be targeted with one or more than one rounds of nucleic acid administration.

[0313] Other aspects of the invention relate to transplantation of cells containing modified nucleic acids to a mammalian subject. Administration of cells to mammalian subjects is known to those of ordinary skill in the art, such as local implantation (e.g., topical or subcutaneous administration), organ delivery or systemic injection (e.g., intravenous injection or inhalation), as is the formulation of cells in pharmaceutically acceptable carrier. Compositions containing modified nucleic acids are formulated for administration intramuscularly, transarterially, intraocularly, vaginally, rectally, intraperitoneally, intravenously, intranasally, subcutaneously, endoscopically, transdermally, intramuscularly, intraventricularly, intradermally, intrathecally, topically (e.g. by powders, ointments, creams, gels, lotions, and/or drops), mucosally, nasal, enterally, intratumorally, by intratracheal instillation, bronchial instillation, and/or inhalation; nasal spray and/or aerosol, and/or through a portal vein catheter. In some embodiments, the composition is formulated for extended release. In specific embodiments, modified nucleic acid molecules or complexes, and/or pharmaceutical, prophylactic, diagnostic, or imaging compositions thereof, may be administered in a way which allows the modified nucleic acid molecules or complex to cross the blood-brain barrier, vascular barrier, or other epithelial barrier.

[0314] However, the present disclosure encompasses the delivery of modified nucleic acid molecules or complexes, and/or pharmaceutical, prophylactic, diagnostic, or imaging compositions thereof, by any appropriate route taking into consideration likely advances in the sciences of drug delivery.

[0315] The subject to whom the therapeutic agent is administered suffers from or is at risk of developing a disease, disorder, or deleterious condition. Provided are methods of identifying, diagnosing, and classifying subjects on these bases, which may include clinical diagnosis, biomarker levels, genome-wide association studies (GWAS), and other methods known in the art.

[0316] In certain embodiments, the administered modified nucleic acid directs production of one or more recombinant polypeptides that provide a functional activity which is substantially absent in the cell in which the recombinant polypeptide is translated. For example, the missing functional activity may be enzymatic, structural, or gene regulatory in nature. In related embodiments, the administered modified nucleic acid directs production of one or more recombinant polypeptides that increases (e.g., synergistically) a functional activity which is present but substantially deficient in the cell in which the recombinant polypeptide is translated.

[0317] In other embodiments, the administered modified nucleic acid directs production of one or more recombinant polypeptides that replace a polypeptide (or multiple polypeptides) that is substantially absent in the cell in which the recombinant polypeptide is translated. Such absence may be due to genetic mutation of the encoding gene or regulatory pathway thereof. In some embodiments, the recombinant polypeptide increases the level of an endogenous protein in the cell to a desirable level; such an increase may bring the level of the endogenous protein from a subnormal level to a normal level, or from a normal level to a super-normal level.

[0318] Alternatively, the recombinant polypeptide functions to antagonize the activity of an endogenous protein present in, on the surface of, or secreted from the cell. Usually, the activity of the endogenous protein is deleterious to the subject, for example, do to mutation of the endogenous protein resulting in altered activity or localization. Additionally, the recombinant polypeptide antagonizes, directly or indirectly, the activity of a biological moiety present in, on the surface of, or secreted from the cell. Examples of antagonized biological moieties include lipids (e.g., cholesterol), a lipoprotein (e.g., low density lipoprotein), a nucleic acid, a carbohydrate, a protein toxin such as shiga and tetanus toxins, or a small molecule toxin such as botulinum, cholera, and diphtheria toxins. Additionally, the antagonized biological molecule may be an endogenous protein that exhibits an undesirable activity, such as a cytotoxic or cytostatic activity.

[0319] The recombinant proteins described herein are engineered for localization within the cell, potentially within a specific compartment such as the nucleus, or are engineered for secretion from the cell or translocation to the plasma membrane of the cell.

### Therapeutics for Diseases and Conditions

[0320] Provided are methods for treating or preventing a symptom of diseases characterized by missing or aberrant protein activity, by replacing the missing protein activity or overcoming the aberrant protein activity. Because of the rapid initiation of protein production following introduction of modified mRNAs, as compared to viral DNA vectors, the compounds of the present invention are particularly advantageous in treating acute diseases such as sepsis, stroke, and myocardial infarction. Moreover, the lack of transcriptional regulation of the modified mRNAs of the invention is advantageous in that accurate titration of protein production is achievable.

[0321] In some embodiments, modified mRNAs may be derived from cDNA.

[0322] In some embodiments, modified mRNAs and their encoded polypeptides in accordance with the present invention may be used for therapeutic purposes. In some embodiments, modified mRNAs and their encoded polypeptides in accordance with the present invention may be used for treatment of any of a variety of diseases, disorders, and/or conditions, including but not limited to one or more of the following: autoimmune disorders (e.g. diabetes, lupus, multiple sclerosis, psoriasis, rheumatoid arthritis); inflammatory disorders (e.g. arthritis, pelvic inflammatory disease); infectious diseases (e.g. viral infections (e.g., HIV, HCV, RSV), bacterial infections, fungal infections, sepsis); neurological disorders (e.g. Alzheimer's disease, Huntington's disease; autism; Duchenne muscular dystrophy); cardiovascular disorders (e.g. atherosclerosis, hypercholesterolemia, thrombosis, clotting disorders, angiogenic disorders such as macular degeneration); proliferative disorders (e.g. cancer, benign neoplasms); respiratory disorders (e.g. chronic obstructive pulmonary disease); digestive disorders (e.g. inflammatory bowel disease, ulcers); musculoskeletal disorders (e.g. fibromyalgia, arthritis); endocrine, metabolic, and nutritional disorders (e.g. diabetes, osteoporosis); urological disorders (e.g. renal disease); psychological disorders (e.g. depression, schizophrenia); skin disorders (e.g. wounds, eczema); blood and lymphatic disorders (e.g. anemia, hemophilia); etc.

[0323] Diseases characterized by dysfunctional or aberrant protein activity include cystic fibrosis, sickle cell anemia, epidermolysis bullosa, amyotrophic lateral sclerosis, and glucose-6-phosphate dehydrogenase deficiency. The present invention provides a method for treating such conditions or diseases in a subject by introducing nucleic acid or cell-based therapeutics containing the modified nucleic acids provided herein, wherein the modified nucleic acids encode for a protein that antagonizes or otherwise overcomes the aberrant protein activity present in the cell of the subject. Specific examples of a dysfunctional protein are the missense mutation variants of the cystic fibrosis transmembrane conductance regulator (CFTR) gene, which produce a dysfunctional protein variant of CFTR protein, which causes cystic fibrosis.

[0324] Diseases characterized by missing (or substantially diminished such that proper protein function does not occur) protein activity include cystic fibrosis, Niemann-Pick type C, β thalassemia major, Duchenne muscular dystrophy, Hurler Syndrome, Hunter Syndrome, and Hemophilia A. Such proteins may not be present, or are essentially non-functional. The present invention provides a method for treating such conditions or diseases in a subject by introducing nucleic acid or cell-based therapeutics containing the modified nucleic acids provided herein, wherein the modified nucleic acids encode for a protein that replaces the protein activity missing from the target cells of the subject. Specific examples of a dysfunctional protein are the nonsense mutation variants of the cystic fibrosis transmembrane conductance regulator (CFTR) gene, which produce a nonfunctional protein variant of CFTR protein, which causes cystic fibrosis.

[0325] Thus, provided are methods of treating cystic fibrosis in a mammalian subject by contacting a cell of the subject with a modified nucleic acid having a translatable region that encodes a functional CFTR polypeptide, under conditions such that an effective amount of the CTFR polypeptide is present in the cell. Preferred target cells are epithelial, endothelial and mesothelial cells, such as the lung, and methods of administration are determined in view of the target tissue; i.e., for lung delivery, the RNA molecules are formulated for administration by inhalation.

[0326] In another embodiment, the present invention provides a method for treating hyperlipidemia in a subject, by introducing into a cell population of the subject with a modified mRNA molecule encoding Sortilin, a protein recently characterized by genomic studies, thereby ameliorating the hyperlipidemia in a subject. The SORT1 gene encodes a trans-Golgi network (TGN) transmembrane protein called Sortilin. Genetic studies have shown that one of five individuals has a single nucleotide polymorphism, rs12740374, in the 1p13 locus of the SORT1 gene that predisposes them to having low levels of low-density lipoprotein (LDL) and very-low-density lipoprotein (VLDL). Each copy of the minor allele, present in about 30% of people, alters LDL cholesterol by 8 mg/dL, while two copies of the minor allele, present in about 5% of the population, lowers LDL cholesterol 16 mg/dL. Carriers of the minor allele have also been shown to have a 40% decreased risk of myocardial infarction. Functional in vivo studies in mice describes that overexpression of SORT1 in mouse liver tissue led to significantly lower LDL-cholesterol levels, as much as 80% lower, and that silencing SORT1 increased LDL cholesterol approximately 200% (Musunuru K et al. From noncoding variant to phenotype via SORT1 at the 1p13 cholesterol locus. Nature 2010; 466: 714-721; herein incorporated by reference in its entirety).

### Modulation of Cell Fate

[0327] Provided are methods of inducing an alteration in cell fate in a target mammalian cell. The target mammalian cell may be a precursor cell and the alteration may involve driving differentiation into a lineage, or blocking such differentiation. Alternatively, the target mammalian cell may be a differentiated cell, and the cell fate alteration includes driving de-differentiation into a pluripotent precursor cell, or blocking such de-differentiation, such as the dedifferentiation of cancer cells into cancer stem cells. In situations where a change in cell fate is desired, effective amounts of mRNAs encoding a cell fate inductive polypeptide is introduced into a target cell under conditions such that an alteration in cell fate is induced. In some embodiments, the modified mRNAs are useful to reprogram a subpopulation of cells from a first phenotype to a second phenotype. Such a reprogramming may be temporary or permanent.

[0328] Optionally, the reprogramming induces a target cell to adopt an intermediate phenotype.

[0329] Additionally, the methods of the present invention are particularly useful to generate induced pluripotent stem cells (iPS cells) because of the high efficiency of transfection, the ability to re-transfect cells, and the tenability of the amount of recombinant polypeptides produced in the target cells. Further, the use of iPS cells generated using the methods described herein is expected to have a reduced incidence of teratoma formation.

[0330] Also provided are methods of reducing cellular differentiation in a target cell population. For example, a target cell population containing one or more precursor cell types is contacted with a composition having an effective amount of a modified mRNA encoding a polypeptide, under conditions such that the polypeptide is translated and reduces the differentiation of the precursor cell. In non-limiting embodiments, the target cell population contains injured tissue in a mammalian subject or tissue affected by a surgical procedure. The precursor cell is, e.g., a stromal precursor cell, a neural precursor cell, or a mesenchymal precursor cell.

[0331] In a specific embodiment, provided are modified nucleic acids that encode one or more differentiation factors Gata4, Mef2c and Tbx4. These mRNA-generated factors are introduced into fibroblasts and drive the reprogramming into cardiomyocytes. Such a reprogramming can be performed in vivo, by contacting an mRNA-containing patch or other material to damaged cardiac tissue to facilitate cardiac regeneration. Such a process promotes cardiomyocyte genesis as opposed to fibrosis.

### Targeting of Pathogenic Organisms; Purification of Biological Materials

[0332] Provided herein are methods for targeting pathogenic microorganisms, such as bacteria, yeast, protozoa, helminthes and the like, using modified mRNAs that encode cytostatic or cytotoxic polypeptides. Preferably the mRNA introduced into the target pathogenic organism contains modified nucleosides or other nucleic acid sequence modifications that the mRNA is translated exclusively, or preferentially, in the target pathogenic organism, to reduce possible off-target effects of the therapeutic. Such methods are useful for removing pathogenic organisms from biological material, including blood, semen, eggs, and transplant materials including embryos, tissues, and organs.

### Targeting Diseased Cells

[0333] Provided herein are methods for targeting pathogenic or diseased cells, particularly cancer cells, using modified mRNAs that encode cytostatic or cytotoxic polypeptides. Preferably the mRNA introduced into the target pathogenic cell contains modified nucleosides or other nucleic acid sequence modifications that the mRNA is translated exclusively, or preferentially, in the target pathogenic cell, to reduce possible off-target effects of the therapeutic. Alternatively, the invention provides targeting moieties that are capable of targeting the modified mRNAs to preferentially bind to and enter the target pathogenic cell.

### Protein Production

[0334] The methods provided herein are useful for enhancing protein product yield in a cell culture process. In a cell culture containing a plurality of host cells, introduction of the modified mRNAs described herein results in increased protein production efficiency relative to a corresponding unmodified nucleic acid. Such increased protein production efficiency can be demonstrated, e.g., by showing increased cell transfection, increased protein translation from the nucleic acid, decreased nucleic acid degradation, and/or reduced innate immune response of the host cell. Protein production can be measured by ELISA, and protein activity can be measured by various functional assays known in the art. The protein production may be generated in a continuous or a fed-batch mammalian process.

[0335] Additionally, it is useful to optimize the expression of a specific polypeptide in a cell line or collection of cell lines of potential interest, particularly an engineered protein such as a protein variant of a reference protein having a known activity. In one embodiment, provided is a method of optimizing expression of an engineered protein in a target cell, by providing a plurality of target cell types, and independently contacting with each of the plurality of target cell types a modified mRNA encoding an engineered polypeptide. Additionally, culture conditions may be altered to increase protein production efficiency. Subsequently, the presence and/or level of the engineered polypeptide in the plurality of target cell types is detected and/or quantitated, allowing for the optimization of an engineered polypeptide's expression by selection of an efficient target cell and cell culture conditions relating thereto. Such methods are particularly useful when the engineered polypeptide contains one or more post-translational modifications or has substantial tertiary structure, situations which often complicate efficient protein production.

### Gene Silencing

[0336] The modified mRNAs described herein are useful to silence (i.e., prevent or substantially reduce) expression of one or more target genes in a cell population. A modified mRNA encoding a polypeptide capable of directing sequence-specific histone H3 methylation is introduced into the cells in the population under conditions such that the polypeptide is translated and reduces gene transcription of a target gene via histone H3 methylation and subsequent heterochromatin formation. In some embodiments, the silencing mechanism is performed on a cell population present in a mammalian subject. By way of non-limiting example, a useful target gene is a mutated Janus Kinase-2 family member, wherein the mammalian subject expresses the mutant target gene suffers from a myeloproliferative disease resulting from aberrant kinase activity.

[0337] Co-administration of modified mRNAs and siRNAs are also provided herein. As demonstrated in yeast, sequence-specific trans silencing is an effective mechanism for altering cell function. Fission yeast require two RNAi complexes for siRNA-mediated heterochromatin assembly: the RNA-induced transcriptional silencing (RITS) complex and the RNA-directed RNA polymerase complex (RDRC) (Motamedi et al. Cell 2004, 119, 789-802; herein incorporated by reference in its entirety). In fission yeast, the RITS complex contains the siRNA binding Argonaute family protein Ago1, a chromodomain protein Chp1, and Tas3. The fission yeast RDRC complex is composed of an RNA-dependent RNA Polymerase Rdp1, a putative RNA helicase Hrr1, and a polyA polymerase family protein Cid12. These two complexes require the Dicer ribonuclease and Clr4 histone H3 methyltransferase for activity. Together, Ago1 binds siRNA molecules generated through Dicer-mediated cleavage of Rdp1 co-transcriptionally generated dsRNA transcripts and allows for the sequence-specific direct association of Chp1, Tas3, Hrr1, and Clr4 to regions of DNA destined for methylation and histone modification and subsequent compaction into transcriptionally silenced heterochromatin. While this mechanism functions in cis- with centromeric regions of DNA, sequence-specific trans silencing is possible through co-transfection with double-stranded siRNAs for specific regions of DNA and concomitant RNAi-directed silencing of the siRNA ribonuclease Eri1 (Buhler et al. Cell 2006, 125, 873-886; herein incorporated by reference in its entirety).

### Modulation of Biological Pathways

[0338] The rapid translation of modified mRNAs introduced into cells provides a desirable mechanism of modulating target biological pathways. Such modulation includes antagonism or agonism of a given pathway. In one embodiment, a method is provided for antagonizing a biological pathway in a cell by contacting the cell with an effective amount of a composition comprising a modified nucleic acid encoding a recombinant polypeptide, under conditions such that the nucleic acid is localized into the cell and the recombinant polypeptide is capable of being translated in the cell from the nucleic acid, wherein the recombinant polypeptide inhibits the activity of a polypeptide functional in the biological pathway. Exemplary biological pathways are those defective in an autoimmune or inflammatory disorder such as multiple sclerosis, rheumatoid arthritis, psoriasis, lupus erythematosus, ankylosing spondylitis colitis, or Crohn's disease; in particular, antagonism of the IL-12 and IL-23 signaling pathways are of particular utility. (See Kikly K, Liu L, Na S, Sedgwick J D (2006) Curr. Opin. Immunol. 18 (6): 670-5; herein incorporated by reference in its entirety).

[0339] Further, provided are modified nucleic acids encoding an antagonist for chemokine receptors; chemokine receptors CXCR-4 and CCR-5 are required for, e.g., HIV entry into host cells (Arenzana-Seisdedos F et al, (1996) Nature. October 3; 383(6599):400; herein incorporated by reference in its entirety).

[0340] Alternatively, provided are methods of agonizing a biological pathway in a cell by contacting the cell with an effective amount of a modified nucleic acid encoding a recombinant polypeptide under conditions such that the nucleic acid is localized into the cell and the recombinant polypeptide is capable of being translated in the cell from the nucleic acid, and the recombinant polypeptide induces the activity of a polypeptide functional in the biological pathway. Exemplary agonized biological pathways include pathways that modulate cell fate determination. Such agonization is reversible or, alternatively, irreversible.

### Cellular Nucleic Acid Delivery

[0341] Methods of the present invention enhance nucleic acid delivery into a cell population, in vivo, ex vivo, or in culture. For example, a cell culture containing a plurality of host cells (e.g., eukaryotic cells such as yeast or mammalian cells) is contacted with a composition that contains an enhanced nucleic acid having at least one nucleoside modification and, optionally, a translatable region. The composition also generally contains a transfection reagent or other compound that increases the efficiency of enhanced nucleic acid uptake into the host cells. The enhanced nucleic acid exhibits enhanced retention in the cell population, relative to a corresponding unmodified nucleic acid. The retention of the enhanced nucleic acid is greater than the retention of the unmodified nucleic acid. In some embodiments, it is at least about 50%, 75%, 90%, 95%, 100%, 150%, 200% or more than 200% greater than the retention of the unmodified nucleic acid. Such retention advantage may be achieved by one round of transfection with the enhanced nucleic acid, or may be obtained following repeated rounds of transfection.

[0342] In some embodiments, the enhanced nucleic acid is delivered to a target cell population with one or more additional nucleic acids. Such delivery may be at the same time, or the enhanced nucleic acid is delivered prior to delivery of the one or more additional nucleic acids. The additional one or more nucleic acids may be modified nucleic acids or unmodified nucleic acids. It is understood that the initial presence of the enhanced nucleic acids does not substantially induce an innate immune response of the cell population and, moreover, that the innate immune response will not be activated by the later presence of the unmodified nucleic acids. In this regard, the enhanced nucleic acid may not itself contain a translatable region, if the protein desired to be present in the target cell population is translated from the unmodified nucleic acids.

### Expression of Ligand or Receptor on Cell Surface

[0343] In some aspects and embodiments of the aspects described herein, the modified RNAs can be used to express a ligand or ligand receptor on the surface of a cell (e.g., a homing moiety). A ligand or ligand receptor moiety attached to a cell surface can permit the cell to have a desired biological interaction with a tissue or an agent in vivo. A ligand can be an antibody, an antibody fragment, an aptamer, a peptide, a vitamin, a carbohydrate, a protein or polypeptide, a receptor, e.g., cell-surface receptor, an adhesion molecule, a glycoprotein, a sugar residue, a therapeutic agent, a drug, a glycosaminoglycan, or any combination thereof. For example, a ligand can be an antibody that recognizes a cancer-cell specific antigen, rendering the cell capable of preferentially interacting with tumor cells to permit tumor-specific localization of a modified cell. A ligand can confer the ability of a cell composition to accumulate in a tissue to be treated, since a preferred ligand may be capable of interacting with a target molecule on the external face of a tissue to be treated. Ligands having limited cross-reactivity to other tissues are generally preferred.

[0344] In some cases, a ligand can act as a homing moiety which permits the cell to target to a specific tissue or interact with a specific ligand. Such homing moieties can include, but are not limited to, any member of a specific binding pair, antibodies, monoclonal antibodies, or derivatives or analogs thereof, including without limitation: Fv fragments, single chain Fv (scFv) fragments, Fab′ fragments, F(ab′)2 fragments, single domain antibodies, camelized antibodies and antibody fragments, humanized antibodies and antibody fragments, and multivalent versions of the foregoing; multivalent binding reagents including without limitation: monospecific or bispecific antibodies, such as disulfide stabilized Fv fragments, scFv tandems ((SCFV)₂ fragments), diabodies, tribodies or tetrabodies, which typically are covalently linked or otherwise stabilized (i.e., leucine zipper or helix stabilized) scFv fragments; and other homing moieties include for example, aptamers, receptors, and fusion proteins.

[0345] In some embodiments, the homing moiety may be a surface-bound antibody, which can permit tuning of cell targeting specificity. This is especially useful since highly specific antibodies can be raised against an epitope of interest for the desired targeting site. In one embodiment, multiple antibodies are expressed on the surface of a cell, and each antibody can have a different specificity for a desired target. Such approaches can increase the avidity and specificity of homing interactions.

[0346] A skilled artisan can select any homing moiety based on the desired localization or function of the cell, for example an estrogen receptor ligand, such as tamoxifen, can target cells to estrogen-dependent breast cancer cells that have an increased number of estrogen receptors on the cell surface. Other non-limiting examples of ligand/receptor interactions include CCRI (e.g., for treatment of inflamed joint tissues or brain in rheumatoid arthritis, and/or multiple sclerosis), CCR7, CCR8 (e.g., targeting to lymph node tissue), CCR6, CCR9, CCR10 (e.g., to target to intestinal tissue), CCR4, CCR10 (e.g., for targeting to skin), CXCR4 (e.g., for general enhanced transmigration), HCELL (e.g., for treatment of inflammation and inflammatory disorders, bone marrow), Alpha4beta7 (e.g., for intestinal mucosa targeting), VLA-4/VCAM-1 (e.g., targeting to endothelium). In general, any receptor involved in targeting (e.g., cancer metastasis) can be harnessed for use in the methods and compositions described herein.

### Mediators of Cell Death

[0347] In one embodiment, a modified nucleic acid molecule composition can be used to induce apoptosis in a cell (e.g., a cancer cell) by increasing the expression of a death receptor, a death receptor ligand or a combination thereof. This method can be used to induce cell death in any desired cell and has particular usefulness in the treatment of cancer where cells escape natural apoptotic signals.

[0348] Apoptosis can be induced by multiple independent signaling pathways that converge upon a final effector mechanism consisting of multiple interactions between several “death receptors” and their ligands, which belong to the tumor necrosis factor (TNF) receptor/ligand superfamily. The best-characterized death receptors are CD95 (“Fas”), TNFRI (p55), death receptor 3 (DR3 or Apo3/TRAMO), DR4 and DR5 (apo2-TRAIL-R2). The final effector mechanism of apoptosis may be the activation of a series of proteinases designated as caspases. The activation of these caspases results in the cleavage of a series of vital cellular proteins and cell death. The molecular mechanism of death receptors/ligands-induced apoptosis is well known in the art. For example, Fas/FasL-mediated apoptosis is induced by binding of three FasL molecules which induces trimerization of Fas receptor via C-terminus death domains (DDs), which in turn recruits an adapter protein FADD (Fas-associated protein with death domain) and Caspase-8. The oligomerization of this trimolecular complex, Fas/FAIDD/caspase-8, results in proteolytic cleavage of proenzyme caspase-8 into active caspase-8 that, in turn, initiates the apoptosis process by activating other downstream caspases through proteolysis, including caspase-3. Death ligands in general are apoptotic when formed into trimers or higher order of structures. As monomers, they may serve as antiapoptotic agents by competing with the trimers for binding to the death receptors.

[0349] In one embodiment, the modified nucleic acid molecule composition encodes for a death receptor (e.g., Fas, TRAIL, TRAMO, TNFR, TLR etc). Cells made to express a death receptor by transfection of modified RNA become susceptible to death induced by the ligand that activates that receptor. Similarly, cells made to express a death ligand, e.g., on their surface, will induce death of cells with the receptor when the transfected cell contacts the target cell. In another embodiment, the modified RNA composition encodes for a death receptor ligand (e.g., FasL, TNF, etc). In another embodiment, the modified RNA composition encodes a caspase (e.g., caspase 3, caspase 8, caspase 9 etc). Where cancer cells often exhibit a failure to properly differentiate to a non-proliferative or controlled proliferative form, in another embodiment, the synthetic, modified RNA composition encodes for both a death receptor and its appropriate activating ligand. In another embodiment, the synthetic, modified RNA composition encodes for a differentiation factor that when expressed in the cancer cell, such as a cancer stem cell, will induce the cell to differentiate to a non-pathogenic or nonself-renewing phenotype (e.g., reduced cell growth rate, reduced cell division etc) or to induce the cell to enter a dormant cell phase (e.g., G₀ resting phase).

[0350] One of skill in the art will appreciate that the use of apoptosis-inducing techniques may require that the modified nucleic acid molecules are appropriately targeted to e.g., tumor cells to prevent unwanted wide-spread cell death. Thus, one can use a delivery mechanism (e.g., attached ligand or antibody, targeted liposome etc) that recognizes a cancer antigen such that the modified nucleic acid molecules are expressed only in cancer cells.

### Exemplary Properties of Modified Nucleic Acid Molecules

### Major Groove Interacting Partners

[0351] The modified nucleic acid molecules, e.g., modified mRNA (mRNA), described herein can disrupt interactions with recognition receptors that detect and respond to RNA ligands through interactions, e.g. binding, with the major groove face of a nucleotide or nucleic acid. As such, RNA ligands comprising modified nucleotides or nucleic acids such as the modified RNAs as described herein decrease interactions with major groove binding partners, and therefore decrease an innate immune response or expression and secretion of pro-inflammatory cytokines, or both.

[0352] Example major groove interacting, e.g. binding, partners include, but are not limited to the following nucleases and helicases. Within membranes, TLRs (Toll-like Receptors) 3, 7, and 8 can respond to single- and double-stranded RNAs. Within the cytoplasm, members of the superfamily 2 class of DEX(D/H) helicases and ATPases can sense RNAs to initiate antiviral responses. These helicases include the RIG-I (retinoic acid-inducible gene I) and MDA5 (melanoma differentiation-associated gene 5). Other examples include laboratory of genetics and physiology 2 (LGP2), HIN-200 domain containing proteins, or Helicase-domain containing proteins.

### Polypeptide Variants

[0353] Provided are nucleic acids that encode variant polypeptides, which have a certain identity with a reference polypeptide sequence. The term “identity” as known in the art, refers to a relationship between the sequences of two or more peptides, as determined by comparing the sequences. In the art, “identity” also means the degree of sequence relatedness between peptides, as determined by the number of matches between strings of two or more amino acid residues.

[0354] “Identity” measures the percent of identical matches between the smaller of two or more sequences with gap alignments (if any) addressed by a particular mathematical model or computer program (i.e., “algorithms”). Identity of related peptides can be readily calculated by known methods. Such methods include, but are not limited to, those described in Computational Molecular Biology, Lesk, A. M., ed., Oxford University Press, New York, 1988; Biocomputing: Informatics and Genome Projects, Smith, D. W., ed., Academic Press, New York, 1993; Computer Analysis of Sequence Data, Part 1, Griffin, A. M., and Griffin, H. G., eds., Humana Press, New Jersey, 1994; Sequence Analysis in Molecular Biology, von Heinje, G., Academic Press, 1987; Sequence Analysis Primer, Gribskov, M. and Devereux, J., eds., M. Stockton Press, New York, 1991; and Carillo et al., SIAM J. Applied Math. 48, 1073 (1988); all of which are herein incorporated by reference in their entirety.

[0355] In some embodiments, the polypeptide variant has the same or a similar activity as the reference polypeptide. Alternatively, the variant has an altered activity (e.g., increased or decreased) relative to a reference polypeptide. Generally, variants of a particular polynucleotide or polypeptide of the invention will have at least about 40%, 45%, 50%, 55%, 60%, 65%, 70%, 75%, 80%, 85%, 90%, 91%, 92%, 93%, 94%, 95%, 96%, 97%, 98%, 99% or more sequence identity to that particular reference polynucleotide or polypeptide as determined by sequence alignment programs and parameters described herein and known to those skilled in the art.

[0356] As recognized by those skilled in the art, protein fragments, functional protein domains, and homologous proteins are also considered to be within the scope of this invention. For example, provided herein is any protein fragment of a reference protein (meaning a polypeptide sequence at least one amino acid residue shorter than a reference polypeptide sequence but otherwise identical) 10, 20, 30, 40, 50, 60, 70, 80, 90, 100 or greater than 100 amino acids in length In another example, any protein that includes a stretch of about 20, about 30, about 40, about 50, or about 100 amino acids which are about 40%, about 50%, about 60%, about 70%, about 80%, about 90%, about 95%, or about 100% identical to any of the sequences described herein can be utilized in accordance with the invention. In certain embodiments, a protein sequence to be utilized in accordance with the invention includes 2, 3, 4, 5, 6, 7, 8, 9, 10, or more mutations as shown in any of the sequences provided or referenced herein.

### Polypeptide Libraries

[0357] Also provided are polynucleotide libraries containing nucleoside modifications, wherein the polynucleotides individually contain a first nucleic acid sequence encoding a polypeptide, such as an antibody, protein binding partner, scaffold protein, and other polypeptides known in the art. Preferably, the polynucleotides are mRNA in a form suitable for direct introduction into a target cell host, which in turn synthesizes the encoded polypeptide.

[0358] In certain embodiments, multiple variants of a protein, each with different amino acid modification(s), are produced and tested to determine the best variant in terms of pharmacokinetics, stability, biocompatibility, and/or biological activity, or a biophysical property such as expression level. Such a library may contain 10, 10², 10³, 10⁴, 10⁵, 10⁶, 10⁷, 10⁸, 10⁹, or over 10⁹ possible variants (including substitutions, deletions of one or more residues, and insertion of one or more residues).

### Polypeptide-Nucleic Acid Complexes

[0359] Proper protein translation involves the physical aggregation of a number of polypeptides and nucleic acids associated with the mRNA. Provided by the invention are complexes containing conjugates of protein and nucleic acids, containing a translatable mRNA having one or more nucleoside modifications (e.g., at least two different nucleoside modifications) and one or more polypeptides bound to the mRNA. Generally, the proteins are provided in an amount effective to prevent or reduce an innate immune response of a cell into which the complex is introduced.

### Targeting Moieties

[0360] In embodiments of the invention, modified nucleic acids are provided to express a protein-binding partner or a receptor on the surface of the cell, which functions to target the cell to a specific tissue space or to interact with a specific moiety, either in vivo or in vitro. Suitable protein-binding partners include antibodies and functional fragments thereof, scaffold proteins, or peptides. Additionally, modified nucleic acids can be employed to direct the synthesis and extracellular localization of lipids, carbohydrates, or other biological moieties.

[0361] As described herein, a useful feature of the modified nucleic acids of the invention is the capacity to reduce the innate immune response of a cell to an exogenous nucleic acid. Provided are methods for performing the titration, reduction or elimination of the immune response in a cell or a population of cells. In some embodiments, the cell is contacted with a first composition that contains a first dose of a first exogenous nucleic acid including a translatable region and at least one nucleoside modification, and the level of the innate immune response of the cell to the first exogenous nucleic acid is determined. Subsequently, the cell is contacted with a second composition, which includes a second dose of the first exogenous nucleic acid, the second dose containing a lesser amount of the first exogenous nucleic acid as compared to the first dose.

[0362] Alternatively, the cell is contacted with a first dose of a second exogenous nucleic acid. The second exogenous nucleic acid may contain one or more modified nucleosides, which may be the same or different from the first exogenous nucleic acid or, alternatively, the second exogenous nucleic acid may not contain modified nucleosides. The steps of contacting the cell with the first composition and/or the second composition may be repeated one or more times.

[0363] Additionally, efficiency of protein production (e.g., protein translation) in the cell is optionally determined, and the cell may be re-transfected with the first and/or second composition repeatedly until a target protein production efficiency is achieved.

[0364] As described herein, provided are mRNAs having sequences that are substantially not translatable. Such mRNA may be effective as a vaccine when administered to a subject. It is further provided that the subject administered the vaccine may be a mammal, more preferably a human and most preferably a patient.

[0365] Also provided are modified nucleic acids that contain one or more noncoding regions. Such modified nucleic acids are generally not translated, but are capable of binding to and sequestering one or more translational machinery component such as a ribosomal protein or a transfer RNA (tRNA), thereby effectively reducing protein expression in the cell. The modified nucleic acid may contain a small nucleolar RNA (sno-RNA), micro RNA (miRNA), small interfering RNA (siRNA) or Piwi-interacting RNA (piRNA).

### Activation of the Immune Response: Vaccines

[0366] In one embodiment of the present invention, mRNA molecules may be used to elicit or provoke an immune response in an organism. The mRNA molecules to be delivered may encode an immunogenic peptide or polypeptide and may encode more than one such peptide or polypeptide.

[0367] Additionally, certain modified nucleosides, or combinations thereof, when introduced into modified nucleic acids activate the innate immune response. Such activating modified nucleic acids, e.g., modified RNAs, are useful as adjuvants when combined with polypeptide or other vaccines. In certain embodiments, the activated modified mRNAs contain a translatable region which encodes for a polypeptide sequence useful as a vaccine, thus providing the ability to be a self-adjuvant.

[0368] In one embodiment, the modified nucleic acid molecules and/or mRNA of the invention may encode an immunogen. The delivery of modified nucleic acid molecules and/or mRNA encoding an immunogen may activate the immune response. As a non-limiting example, the modified nucleic acid molecules and/or mRNA encoding an immunogen may be delivered to cells to trigger multiple innate response pathways (see International Pub. No. WO2012006377; herein incorporated by reference in its entirety). As another non-limiting example, the modified nucleic acid molecules and mRNA of the present invention encoding an immunogen may be delivered to a vertebrate in a dose amount large enough to be immunogenic to the vertebrate (see International Pub. No. WO2012006372 and WO2012006369; each of which is herein incorporated by reference in their entirety).

[0369] The modified nucleic acid molecules or mRNA of invention may encode a polypeptide sequence for a vaccine and may further comprise an inhibitor. The inhibitor may impair antigen presentation and/or inhibit various pathways known in the art. As a non-limiting example, the modified nucleic acid molecules or mRNA of the invention may be used for a vaccine in combination with an inhibitor which can impair antigen presentation (see International Pub. No. WO2012089225 and WO2012089338; each of which is herein incorporated by reference in their entirety).

[0370] In one embodiment, the modified nucleic acid molecules or mRNA of the invention may be self-replicating RNA. Self-replicating RNA molecules can enhance efficiency of RNA delivery and expression of the enclosed gene product. In one embodiment, the modified nucleic acid molecules or mRNA may comprise at least one modification described herein and/or known in the art. In one embodiment, the self-replicating RNA can be designed so that the self-replicating RNA does not induce production of infectious viral particles. As a non-limiting example the self-replicating RNA may be designed by the methods described in US Pub. No. US20110300205 and International Pub. No. WO2011005799, each of which is herein incorporated by reference in their entirety.

[0371] In one embodiment, the self-replicating modified nucleic acid molecules or mRNA of the invention may encode a protein which may raise the immune response. As a non-limiting example, the modified nucleic acid molecules and/or mRNA may be self-replicating mRNA may encode at least one antigen (see US Pub. No. US20110300205 and International Pub. No. WO2011005799; each of which is herein incorporated by reference in their entirety).

[0372] In one embodiment, the self-replicating modified nucleic acids or mRNA of the invention may be formulated using methods described herein or known in the art. As a non-limiting example, the self-replicating RNA may be formulated for delivery by the methods described in Geall et al (Nonviral delivery of self-amplifying RNA vaccines, PNAS 2012; PMID: 22908294; herein incorporated by reference in its entirety).

[0373] In one embodiment, the modified nucleic acid molecules or mRNA of the present invention may encode amphipathic and/or immunogenic amphipathic peptides.

[0374] In on embodiment, a formulation of the modified nucleic acid molecules or mRNA of the present invention may further comprise an amphipathic and/or immunogenic amphipathic peptide. As a non-limiting example, the modified nucleic acid molecule or mRNA comprising an amphipathic and/or immunogenic amphipathic peptide may be formulated as described in US. Pub. No. US20110250237 and International Pub. Nos. WO2010009277 and WO2010009065; each of which is herein incorporated by reference in their entirety.

[0375] In one embodiment, the modified nucleic acid molecules and mRNA of the present invention may be immunostimultory. As a non-limiting example, the modified nucleic acid molecules and mRNA may encode all or a part of a positive-sense or a negative-sense stranded RNA virus genome (see International Pub No. WO2012092569 and US Pub No. US20120177701, each of which is herein incorporated by reference in their entirety). In another non-limiting example, the immunostimultory modified nucleic acid molecules or mRNA of the present invention may be formulated with an excipient for administration as described herein and/or known in the art (see International Pub No. WO2012068295 and US Pub No. US20120213812, each of which is herein incorporated by reference in their entirety).

[0376] In one embodiment, the response of the vaccine formulated by the methods described herein may be enhanced by the addition of various compounds to induce the therapeutic effect. As a non-limiting example, the vaccine formulation may include a MHC II binding peptide or a peptide having a similar sequence to a MHC II binding peptide (see International Pub Nos. WO2012027365, WO2011031298 and US Pub No. US20120070493, US20110110965, each of which is herein incorporated by reference in their entirety). As another example, the vaccine formulations may comprise modified nicotinic compounds which may generate an antibody response to nicotine residue in a subject (see International Pub No. WO2012061717 and US Pub No. US20120114677, each of which is herein incorporated by reference in their entirety).

### Pharmaceutical Compositions

### Formulation, Administration, Delivery and Dosing

[0377] The present invention provides modified nucleic acids and mRNA compositions and complexes in combination with one or more pharmaceutically acceptable excipients. Pharmaceutical compositions may optionally comprise one or more additional active substances, e.g. therapeutically and/or prophylactically active substances. General considerations in the formulation and/or manufacture of pharmaceutical agents may be found, for example, in Remington: The Science and Practice of Pharmacy 21^{st} ed., Lippincott Williams & Wilkins, 2005 (incorporated herein by reference in its entirety).

[0378] In some embodiments, compositions are administered to humans, human patients or subjects. For the purposes of the present disclosure, the phrase “active ingredient” generally refers to modified nucleic acids and mRNA to be delivered as described herein.

[0379] Although the descriptions of pharmaceutical compositions provided herein are principally directed to pharmaceutical compositions which are suitable for administration to humans, it will be understood by the skilled artisan that such compositions are generally suitable for administration to animals of all sorts. Modification of pharmaceutical compositions suitable for administration to humans in order to render the compositions suitable for administration to various animals is well understood, and the ordinarily skilled veterinary pharmacologist can design and/or perform such modification with merely ordinary, if any, experimentation. Subjects to which administration of the pharmaceutical compositions is contemplated include, but are not limited to, humans and/or other primates; mammals, including commercially relevant mammals such as cattle, pigs, horses, sheep, cats, dogs, mice, and/or rats; and/or birds, including commercially relevant birds such as chickens, ducks, geese, and/or turkeys.

[0380] Formulations of the pharmaceutical compositions described herein may be prepared by any method known or hereafter developed in the art of pharmacology. In general, such preparatory methods include the step of bringing the active ingredient into association with an excipient and/or one or more other accessory ingredients, and then, if necessary and/or desirable, shaping and/or packaging the product into a desired single- or multi-dose unit.

[0381] A pharmaceutical composition in accordance with the invention may be prepared, packaged, and/or sold in bulk, as a single unit dose, and/or as a plurality of single unit doses. As used herein, a “unit dose” is discrete amount of the pharmaceutical composition comprising a predetermined amount of the active ingredient. The amount of the active ingredient is generally equal to the dosage of the active ingredient which would be administered to a subject and/or a convenient fraction of such a dosage such as, for example, one-half or one-third of such a dosage.

[0382] The present invention provides modified nucleic acid molecules, and complexes containing modified nucleic acids associated with other deliverable moieties. Thus, the present invention provides pharmaceutical compositions comprising one or more modified nucleic acids, or one or more such complexes, and one or more pharmaceutically acceptable excipients. Pharmaceutical compositions may optionally comprise one or more additional therapeutically active substances. In some embodiments, compositions are administered to humans.

[0383] Relative amounts of the active ingredient, the pharmaceutically acceptable excipient, and/or any additional ingredients in a pharmaceutical composition in accordance with the invention will vary, depending upon the identity, size, and/or condition of the subject treated and further depending upon the route by which the composition is to be administered. By way of example, the composition may comprise between 0.1% and 100% (w/w) e.g., between 0.5 and 50%, between 1-30%, between 5-80%, at least 80% (w/w) active ingredient.

[0384] In one embodiment, provided are formulations containing an effective amount of a modified nucleic acid (e.g., an mRNA) engineered to avoid an innate immune response of a cell into which the modified nucleic acid enters. The modified nucleic acid generally includes a nucleotide sequence encoding a polypeptide of interest.

[0385] When administered to a subject the pharmaceutical compositions described herein may provide proteins which have been generated from modified mRNAs. Pharmaceutical compositions may optionally comprise one or more additional therapeutically active substances. In accordance with some embodiments, a method of administering pharmaceutical compositions comprising one or more proteins to be delivered to a subject in need thereof is provided. In some embodiments, compositions are administered to human subjects. In a further embodiment, the compositions are administered to a subject who is a patient.

[0386] In one embodiment, the pharmaceutical compositions described herein can include one or more pharmaceutically acceptable carriers.

### Formulations

[0387] The modified nucleic acid, and mRNA of the invention can be formulated using one or more excipients to: (1) increase stability; (2) increase cell transfection; (3) permit the sustained or delayed release (e.g., from a depot formulation of the modified nucleic acid, or mRNA); (4) alter the biodistribution (e.g., target the modified nucleic acid, or mRNA to specific tissues or cell types); (5) increase the translation of encoded protein in vivo; and/or (6) alter the release profile of encoded protein in vivo. In addition to traditional excipients such as any and all solvents, dispersion media, diluents, or other liquid vehicles, dispersion or suspension aids, surface active agents, isotonic agents, thickening or emulsifying agents, preservatives, excipients of the present invention can include, without limitation, lipidoids, liposomes, lipid nanoparticles, polymers, lipoplexes, core-shell nanoparticles, peptides, proteins, cells transfected with modified nucleic acid, or mRNA (e.g., for transplantation into a subject), hyaluronidase, nanoparticle mimics and combinations thereof. Accordingly, the formulations of the invention can include one or more excipients, each in an amount that together increases the stability of the modified nucleic acid, or mRNA, increases cell transfection by the modified nucleic acid, or mRNA, increases the expression of modified nucleic acid, or mRNA encoded protein, and/or alters the release profile of modified nucleic acid, or mRNA encoded proteins. Further, the modified nucleic acids and mRNA of the present invention may be formulated using self-assembled nucleic acid nanoparticles.

[0388] Formulations of the pharmaceutical compositions described herein may be prepared by any method known or hereafter developed in the art of pharmacology. In general, such preparatory methods include the step of associating the active ingredient with an excipient and/or one or more other accessory ingredients.

[0389] Formulations which may be used in the present invention may be prepared as described in PCT/US2012/68714; the contents of which are herein incorporated by reference in its entirety.

[0390] A pharmaceutical composition in accordance with the present disclosure may be prepared, packaged, and/or sold in bulk, as a single unit dose, and/or as a plurality of single unit doses. As used herein, a “unit dose” refers to a discrete amount of the pharmaceutical composition comprising a predetermined amount of the active ingredient. The amount of the active ingredient may generally be equal to the dosage of the active ingredient which would be administered to a subject and/or a convenient fraction of such a dosage including, but not limited to, one-half or one-third of such a dosage.

[0391] Relative amounts of the active ingredient, the pharmaceutically acceptable excipient, and/or any additional ingredients in a pharmaceutical composition in accordance with the present disclosure may vary, depending upon the identity, size, and/or condition of the subject being treated and further depending upon the route by which the composition is to be administered. For example, the composition may comprise between 0.1% and 99% (w/w) of the active ingredient.

[0392] In some embodiments, the modified mRNA formulations described herein may contain at least one modified mRNA. The formulations may contain 1, 2, 3, 4 or 5 modified mRNA. In one embodiment, the formulation contains at least three modified mRNA encoding proteins. In one embodiment, the formulation contains at least five modified mRNA encoding proteins.

[0393] Pharmaceutical formulations may additionally comprise a pharmaceutically acceptable excipient, which, as used herein, includes, but is not limited to, any and all solvents, dispersion media, diluents, or other liquid vehicles, dispersion or suspension aids, surface active agents, isotonic agents, thickening or emulsifying agents, preservatives, and the like, as suited to the particular dosage form desired. Various excipients for formulating pharmaceutical compositions and techniques for preparing the composition are known in the art (see Remington: The Science and Practice of Pharmacy, 21^{st} Edition, A. R. Gennaro, Lippincott, Williams & Wilkins, Baltimore, Md., 2006; incorporated herein by reference in its entirety). The use of a conventional excipient medium may be contemplated within the scope of the present disclosure, except insofar as any conventional excipient medium may be incompatible with a substance or its derivatives, such as by producing any undesirable biological effect or otherwise interacting in a deleterious manner with any other component(s) of the pharmaceutical composition.

[0394] In some embodiments, the particle size of the lipid nanoparticle may be increased and/or decreased. The change in particle size may be able to help counter biological reaction such as, but not limited to, inflammation or may increase the biological effect of the modified mRNA delivered to mammals.

[0395] In one embodiment, modified mRNA for use in the present invention may be formulated as described in PCT/US2012/69610, the contents of which are herein incorporated by reference in its entirety.

[0396] Pharmaceutically acceptable excipients used in the manufacture of pharmaceutical compositions include, but are not limited to, inert diluents, surface active agents and/or emulsifiers, preservatives, buffering agents, lubricating agents, and/or oils. Such excipients may optionally be included in the pharmaceutical formulations of the invention.

[0397] In certain embodiments, the formulations include one or more cell penetration agents, e.g., transfection agents. In one specific embodiment, a ribonucleic acid is mixed or admixed with a transfection agent (or mixture thereof) and the resulting mixture is employed to transfect cells. Preferred transfection agents are cationic lipid compositions, particularly monovalent and polyvalent cationic lipid compositions, more particularly LIPOFECTIN®, LIPOFECTACE, LIPOFECTAMINE®, CELLFECTIN®, DMRIE-C, DMRIE, DOTAP, DOSPA, and DOSPER, and dendrimer compositions, particularly G5-G10 dendrimers, including dense star dendrimers, PAMAM dendrimers, grafted dendrimers, and dendrimers known as dendrigrafts and “SUPERFECT.” In a second specific transfection method, a ribonucleic acid is conjugated to a nucleic acid-binding group, for example a polyamine and more particularly a spermine, which is then introduced into the cell or admixed with a transfection agent (or mixture thereof) and the resulting mixture is employed to transfect cells. In a third specific embodiment, a mixture of one or more transfection-enhancing peptides, proteins, or protein fragments, including fusagenic peptides or proteins, transport or trafficking peptides or proteins, receptor-ligand peptides or proteins, or nuclear localization peptides or proteins and/or their modified analogs (e.g., spermine modified peptides or proteins) or combinations thereof are mixed with and complexed with a ribonucleic acid to be introduced into a cell, optionally being admixed with transfection agent and the resulting mixture is employed to transfect cells. Further, a component of a transfection agent (e.g., lipids, cationic lipids or dendrimers) is covalently conjugated to selected peptides, proteins, or protein fragments directly or via a linking or spacer group. Of particular interest in this embodiment are peptides or proteins that are fusagenic, membrane-permeabilizing, transport or trafficking, or which function for cell-targeting. The peptide- or protein-transfection agent complex is combined with a ribonucleic acid and employed for transfection.

### Lipidoids

[0398] The synthesis of lipidoids has been extensively described and formulations containing these compounds are particularly suited for delivery of modified nucleic acid molecules or mRNA (see Mahon et al., Bioconjug Chem. 2010 21:1448-1454; Schroeder et al., J Intern Med. 2010 267:9-21; Akinc et al., Nat. Biotechnol. 2008 26:561-569; Love et al., Proc Natl Acad Sci USA. 2010 107:1864-1869; Siegwart et al., Proc Natl Acad Sci USA. 2011 108:12996-3001; all of which are incorporated herein in their entireties).

[0399] While these lipidoids have been used to effectively deliver double stranded small interfering RNA molecules in rodents and non-human primates (see Akinc et al., Nat. Biotechnol. 2008 26:561-569; Frank-Kamenetsky et al., Proc Natl Acad Sci USA. 2008 105:11915-11920; Akinc et al., Mol. Ther. 2009 17:872-879; Love et al., Proc Natl Acad Sci USA. 2010 107:1864-1869; Leuschner et al., Nat. Biotechnol. 2011 29:1005-1010; all of which is incorporated herein in their entirety), the present disclosure describes their formulation and use in delivering single stranded modified nucleic acid molecules or mRNA. Complexes, micelles, liposomes or particles can be prepared containing these lipidoids and therefore, can result in an effective delivery of the modified nucleic acid molecules or mRNA, as judged by the production of an encoded protein, following the injection of a lipidoid formulation via localized and/or systemic routes of administration. Lipidoid complexes of modified nucleic acid molecules or mRNA can be administered by various means including, but not limited to, intravenous, intramuscular, or subcutaneous routes.

[0400] In vivo delivery of nucleic acids may be affected by many parameters, including, but not limited to, the formulation composition, nature of particle PEGylation, degree of loading, oligonucleotide to lipid ratio, and biophysical parameters such as, but not limited to, particle size (Akinc et al., Mol. Ther. 2009 17:872-879; herein incorporated by reference in its entirety). As an example, small changes in the anchor chain length of poly(ethylene glycol) (PEG) lipids may result in significant effects on in vivo efficacy. Formulations with the different lipidoids, including, but not limited to penta[3-(1-laurylaminopropionyl)]-triethylenetetramine hydrochloride (TETA-5LAP; aka 98N12-5, see Murugaiah et al., Analytical Biochemistry, 401:61 (2010); herein incorporated by reference in its entirety), C12-200 (including derivatives and variants), and MD1, can be tested for in vivo activity.

[0401] The lipidoid referred to herein as “98N12-5” is disclosed by Akinc et al., Mol. Ther. 2009 17:872-879 and is incorporated by reference in its entirety.

[0402] The lipidoid referred to herein as “C12-200” is disclosed by Love et al., Proc Natl Acad Sci USA. 2010 107:1864-1869 and Liu and Huang, Molecular Therapy. 2010 669-670; both of which are herein incorporated by reference in their entirety. The lipidoid formulations can include particles comprising either 3 or 4 or more components in addition to modified nucleic acid molecules or mRNA. As an example, formulations with certain lipidoids, include, but are not limited to, 98N12-5 and may contain 42% lipidoid, 48% cholesterol and 10% PEG (C14 alkyl chain length). As another example, formulations with certain lipidoids, include, but are not limited to, C12-200 and may contain 50% lipidoid, 10% disteroylphosphatidyl choline, 38.5% cholesterol, and 1.5% PEG-DMG.

[0403] In one embodiment, a modified nucleic acid molecule or mRNA formulated with a lipidoid for systemic intravenous administration can target the liver. For example, a final optimized intravenous formulation using modified nucleic acid molecule or mRNA, and comprising a lipid molar composition of 42% 98N12-5, 48% cholesterol, and 10% PEG-lipid with a final weight ratio of about 7.5 to 1 total lipid to modified nucleic acid, or mRNA, and a C14 alkyl chain length on the PEG lipid, with a mean particle size of roughly 50-60 nm, can result in the distribution of the formulation to be greater than 90% to the liver.(see, Akinc et al., Mol. Ther. 2009 17:872-879; herein incorporated by reference in its entirety). In another example, an intravenous formulation using a C12-200 (see U.S. provisional application 61/175,770 and published international application WO2010129709, each of which is herein incorporated by reference in their entirety) lipidoid may have a molar ratio of 50/10/38.5/1.5 of C12-200/disteroylphosphatidyl choline/cholesterol/PEG-DMG, with a weight ratio of 7 to 1 total lipid to modified nucleic acid molecule or mRNA, and a mean particle size of 80 nm may be effective to deliver modified nucleic acid molecule or mRNA to hepatocytes (see, Love et al., Proc Natl Acad Sci USA. 2010 107:1864-1869 herein incorporated by reference in its entirety). In another embodiment, an MD1 lipidoid-containing formulation may be used to effectively deliver modified nucleic acid molecule or mRNA to hepatocytes in vivo. The characteristics of optimized lipidoid formulations for intramuscular or subcutaneous routes may vary significantly depending on the target cell type and the ability of formulations to diffuse through the extracellular matrix into the blood stream. While a particle size of less than 150 nm may be desired for effective hepatocyte delivery due to the size of the endothelial fenestrae (see, Akinc et al., Mol. Ther. 2009 17:872-879 herein incorporated by reference in its entirety), use of a lipidoid-formulated modified nucleic acid molecules or mRNA to deliver the formulation to other cells types including, but not limited to, endothelial cells, myeloid cells, and muscle cells may not be similarly size-limited. Use of lipidoid formulations to deliver siRNA in vivo to other non-hepatocyte cells such as myeloid cells and endothelium has been reported (see Akinc et al., Nat. Biotechnol. 2008 26:561-569; Leuschner et al., Nat. Biotechnol. 2011 29:1005-1010; Cho et al. Adv. Funct. Mater. 2009 19:3112-3118; 8^{th} International Judah Folkman Conference, Cambridge, Mass. Oct. 8-9, 2010; each of which is herein incorporated by reference in its entirety). Effective delivery to myeloid cells, such as monocytes, lipidoid formulations may have a similar component molar ratio. Different ratios of lipidoids and other components including, but not limited to, disteroylphosphatidyl choline, cholesterol and PEG-DMG, may be used to optimize the formulation of the modified nucleic acid, or mRNA for delivery to different cell types including, but not limited to, hepatocytes, myeloid cells, muscle cells, etc. For example, the component molar ratio may include, but is not limited to, 50% C12-200, 10% disteroylphosphatidyl choline, 38.5% cholesterol, and %1.5 PEG-DMG (see Leuschner et al., Nat Biotechnol 2011 29:1005-1010; herein incorporated by reference in its entirety). The use of lipidoid formulations for the localized delivery of nucleic acids to cells (such as, but not limited to, adipose cells and muscle cells) via either subcutaneous or intramuscular delivery, may not require all of the formulation components desired for systemic delivery, and as such may comprise only the lipidoid and the modified nucleic acid molecule or mRNA.

[0404] Combinations of different lipidoids may be used to improve the efficacy of modified nucleic acid molecule or mRNA directed protein production as the lipidoids may be able to increase cell transfection by the modified nucleic acid molecule or mRNA; and/or increase the translation of encoded protein (see Whitehead et al., Mol. Ther. 2011, 19:1688-1694, herein incorporated by reference in its entirety).

[0405] In certain embodiments, the formulation may include at least a modified nucleic acid and a delivery agent. In some embodiments, the delivery agent may comprise lipidoid-based formulations allowed for localized and systemic delivery of mRNA.

[0406] The pharmaceutical compositions described herein include lipidoid-based formulations allowing for the localized and systemic delivery of mRNA.

### Liposomes, Lipoplexes, and Lipid Nanoparticles

[0407] The modified nucleic acid molecules and mRNA of the invention can be formulated using one or more liposomes, lipoplexes, or lipid nanoparticles. In one embodiment, pharmaceutical compositions of modified nucleic acid molecule or mRNA include liposomes. Liposomes are artificially-prepared vesicles which may primarily be composed of a lipid bilayer and may be used as a delivery vehicle for the administration of nutrients and pharmaceutical formulations. Liposomes can be of different sizes such as, but not limited to, a multilamellar vesicle (MLV) which may be hundreds of nanometers in diameter and may contain a series of concentric bilayers separated by narrow aqueous compartments, a small unicellular vesicle (SUV) which may be smaller than 50 nm in diameter, and a large unilamellar vesicle (LUV) which may be between 50 and 500 nm in diameter. Liposome design may include, but is not limited to, opsonins or ligands in order to improve the attachment of liposomes to unhealthy tissue or to activate events such as, but not limited to, endocytosis. Liposomes may contain a low or a high pH in order to improve the delivery of the pharmaceutical formulations.

[0408] The formation of liposomes may depend on the physicochemical characteristics such as, but not limited to, the pharmaceutical formulation entrapped and the liposomal ingredients, the nature of the medium in which the lipid vesicles are dispersed, the effective concentration of the entrapped substance and its potential toxicity, any additional processes involved during the application and/or delivery of the vesicles, the optimization size, polydispersity and the shelf-life of the vesicles for the intended application, and the batch-to-batch reproducibility and possibility of large-scale production of safe and efficient liposomal products.

[0409] In one embodiment, pharmaceutical compositions described herein may include, without limitation, liposomes such as those formed from 1,2-dioleyloxy-N,N-dimethylaminopropane (DODMA) liposomes, DiLa2 liposomes from Marina Biotech (Bothell, Wash.), 1,2-dilinoleyloxy-3-dimethylaminopropane (DLin-DMA), 2,2-dilinoleyl-4-(2-dimethylaminoethyl)-[1,3]-dioxolane (DLin-KC2-DMA), and MC3 (US20100324120; herein incorporated by reference in its entirety) and liposomes which may deliver small molecule drugs such as, but not limited to, DOXIL® from Janssen Biotech, Inc. (Horsham, Pa.). In one embodiment, pharmaceutical compositions described herein may include, without limitation, liposomes such as those formed from the synthesis of stabilized plasmid-lipid particles (SPLP) or stabilized nucleic acid lipid particle (SNALP) that have been previously described and shown to be suitable for oligonucleotide delivery in vitro and in vivo (see Wheeler et al. Gene Therapy. 1999 6:271-281; Zhang et al. Gene Therapy. 1999 6:1438-1447; Jeffs et al. Pharm Res. 2005 22:362-372; Morrissey et al., Nat. Biotechnol. 2005 2:1002-1007; Zimmermann et al., Nature. 2006 441:111-114; Heyes et al. J Contr Rel. 2005 107:276-287; Semple et al. Nature Biotech. 2010 28:172-176; Judge et al. J Clin Invest. 2009 119:661-673; deFougerolles Hum Gene Ther. 2008 19:125-132; all of which are incorporated herein in their entireties.) The original manufacture method by Wheeler et al. was a detergent dialysis method, which was later improved by Jeffs et al. and is referred to as the spontaneous vesicle formation method. The liposome formulations are composed of 3 to 4 lipid components in addition to the modified nucleic acid molecule or mRNA. As an example a liposome can contain, but is not limited to, 55% cholesterol, 20% disteroylphosphatidyl choline (DSPC), 10% PEG-S-DSG, and 15% 1,2-dioleyloxy-N,N-dimethylaminopropane (DODMA), as described by Jeffs et al. As another example, certain liposome formulations may contain, but are not limited to, 48% cholesterol, 20% DSPC, 2% PEG-c-DMA, and 30% cationic lipid, where the cationic lipid can be 1,2-distearloxy-N,N-dimethylaminopropane (DSDMA), DODMA, DLin-DMA, or 1,2-dilinolenyloxy-3-dimethylaminopropane (DLenDMA), as described by Heyes et al.

[0410] In one embodiment, pharmaceutical compositions may include liposomes which may be formed to deliver mRNA which may encode at least one immunogen. The mRNA may be encapsulated by the liposome and/or it may be contained in an aqueous core which may then be encapsulated by the liposome (see International Pub. Nos. WO2012031046, WO2012031043, WO2012030901 and WO2012006378; each of which is herein incorporated by reference in their entirety). In another embodiment, the mRNA which may encode an immunogen may be formulated in a cationic oil-in-water emulsion where the emulsion particle comprises an oil core and a cationic lipid which can interact with the mRNA anchoring the molecule to the emulsion particle (see International Pub. No. WO2012006380; herein incorporated by reference in its entirety). In yet another embodiment, the lipid formulation may include at least cationic lipid, a lipid which may enhance transfection and a least one lipid which contains a hydrophilic head group linked to a lipid moiety (International Pub. No. WO2011076807 and U.S. Pub. No. 20110200582; each of which is herein incorporated by reference in their entirety). In another embodiment, the modified mRNA encoding an immunogen may be formulated in a lipid vesicle which may have crosslinks between functionalized lipid bilayers (see U.S. Pub. No. 20120177724, herein incorporated by reference in its entirety).

[0411] In one embodiment, the modified mRNA may be formulated in a lipid vesicle which may have crosslinks between functionalized lipid bilayers.

[0412] In one embodiment, the modified mRNA may be formulated in a lipid-polycation complex. The formation of the lipid-polycation complex may be accomplished by methods known in the art and/or as described in U.S. Pub. No. 20120178702, herein incorporated by reference in its entirety. As a non-limiting example, the polycation may include a cationic peptide or a polypeptide such as, but not limited to, polylysine, polyornithine and/or polyarginine and the cationic peptides described in International Pub. No. WO2012013326; herein incorporated by reference in its entirety. In another embodiment, the modified mRNA may be formulated in a lipid-polycation complex which may further include a neutral lipid such as, but not limited to, cholesterol or dioleoyl phosphatidylethanolamine (DOPE).

[0413] The liposome formulation may be influenced by, but not limited to, the selection of the cationic lipid component, the degree of cationic lipid saturation, the nature of the PEGylation, ratio of all components and biophysical parameters such as size. In one example by Semple et al. (Semple et al. Nature Biotech. 2010 28:172-176; herein incorporated by reference in its entirety), the liposome formulation was composed of 57.1% cationic lipid, 7.1% dipalmitoylphosphatidylcholine, 34.3% cholesterol, and 1.4% PEG-c-DMA. As another example, changing the composition of the cationic lipid could more effectively deliver siRNA to various antigen presenting cells (Basha et al. Mol. Ther. 2011 19:2186-2200; herein incorporated by reference in its entirety).

[0414] In some embodiments, the ratio of PEG in the lipid nanoparticle (LNP) formulations may be increased or decreased and/or the carbon chain length of the PEG lipid may be modified from C14 to C18 to alter the pharmacokinetics and/or biodistribution of the LNP formulations. As a non-limiting example, LNP formulations may contain 1-5% of the lipid molar ratio of PEG-c-DOMG as compared to the cationic lipid, DSPC and cholesterol. In another embodiment the PEG-c-DOMG may be replaced with a PEG lipid such as, but not limited to, PEG-DSG (1,2-Distearoyl-sn-glycerol, methoxypolyethylene glycol) or PEG-DPG (1,2-Dipalmitoyl-sn-glycerol, methoxypolyethylene glycol). The cationic lipid may be selected from any lipid known in the art such as, but not limited to, DLin-MC3-DMA, DLin-DMA, C12-200 and DLin-KC2-DMA.

[0415] In one embodiment, the cationic lipid may be selected from, but not limited to, a cationic lipid described in International Publication Nos. WO2012040184, WO2011153120, WO2011149733, WO2011090965, WO2011043913, WO2011022460, WO2012061259, WO2012054365, WO2012044638, WO2010080724, WO201021865 and WO2008103276, U.S. Pat. Nos. 7,893,302, 7,404,969 and 8,283,333 and US Patent Publication No. US20100036115 and US20120202871; each of which is herein incorporated by reference in their entirety. In another embodiment, the cationic lipid may be selected from, but not limited to, formula A described in International Publication Nos. WO2012040184, WO2011153120, WO2011149733, WO2011090965, WO2011043913, WO2011022460, WO2012061259, WO2012054365 and WO2012044638; each of which is herein incorporated by reference in their entirety. In yet another embodiment, the cationic lipid may be selected from, but not limited to, formula CLI-CLXXIX of International Publication No. WO2008103276, formula CLI-CLXXIX of U.S. Pat. No. 7,893,302, formula CLI-CLXXXXII of U.S. Pat. No. 7,404,969 and formula I-VI of US Patent Publication No. US20100036115; each of which is herein incorporated by reference in their entirety. As a non-limiting example, the cationic lipid may be selected from (20Z,23Z)—N,N-dimethylnonacosa-20,23-dien-10-amine, (17Z,20Z)—N,N-dimemylhexacosa-17,20-dien-9-amine, (1Z,19Z)—N5N-dimethylpentacosa-16,19-dien-8-amine, (13Z,16Z)—N,N-dimethyldocosa-13,16-dien-5-amine, (12Z,15Z)—N,N-dimethylhenicosa-12,15-dien-4-amine, (14Z,17Z)—N,N-dimethyltricosa-14,17-dien-6-amine, (15 Z,18Z)—N,N-dimethyltetracosa-15,18-dien-7-amine, (18Z,21Z)—N,N-dimethylheptacosa-18,21-dien-10-amine, (15 Z,18Z)—N,N-dimethyltetracosa-15,18-dien-5-amine, (14Z,17Z)—N,N-dimethyltricosa-14,17-dien-4-amine, (19Z,22Z)—N,N-dimethyloctacosa-19,22-dien-9-amine, (18Z,21Z)—N,N-dimethylheptacosa-18,21-dien-8-amine, (17Z,20Z)—N,N-dimethylhexacosa-17,20-dien-7-amine, (16Z,19Z)—N,N-dimethylpentacosa-16,19-dien-6-amine, (22Z,25Z)—N,N-dimethylhentriaconta-22,25-dien-10-amine, (21 Z,24Z)—N,N-dimethyltriaconta-21,24-dien-9-amine, (18Z)—N,N-dimethylheptacos-18-en-10-amine, (17Z)—N,N-dimethylhexacos-17-en-9-amine, (19Z,22Z)—N,N-dimethyloctacosa-19,22-dien-7-amine, N,N-dimethylheptacosan-10-amine, (20Z,23Z)—N-ethyl-N-methylnonacosa-20,23-dien-10-amine, 1-[(11Z,14Z)-1-nonylicosa-11,14-dien-1-yl]pyrrolidine, (20Z)—N,N-dimethylheptacos-20-en-1 0-amine, (15Z)—N,N-dimethyl eptacos-15-en-10-amine, (14Z)—N,N-dimethylnonacos-14-en-10-amine, (17Z)—N,N-dimethylnonacos-17-en-10-amine, (24Z)—N,N-dimethyltritriacont-24-en-10-amine, (20Z)—N,N-dimethylnonacos-20-en-10-amine, (22Z)—N,N-dimethylhentriacont-22-en-10-amine, (16Z)—N,N-dimethylpentacos-16-en-8-amine, (12Z,15Z)—N,N-dimethyl-2-nonylhenicosa-12,15-dien-1-amine, (13Z,16Z)—N,N-dimethyl-3-nonyldocosa-13,16-dien-1-amine, N,N-dimethyl-1-[(1S,2R)-2-octylcyclopropyl]eptadecan-8-amine, 1-[(1S,2R)-2-hexylcyclopropyl]-N,N-dimethylnonadecan-10-amine, N,N-dimethyl-1-[(1S,2R)-2-octylcyclopropyl]nonadecan-10-amine, N,N-dimethyl-21-[(1S,2R)-2-octylcyclopropyl]henicosan-10-amine,N,N-dimethyl-1-[(1 S,2 S)-2-{[(1R,2R)-2-pentylcyclopropyl]methyl 1 cyclopropyl]nonadecan-10-amine,N,N-dimethyl-1-[(1S,2R)-2-octylcyclopropyl]hexadecan-8-amine, N,N-dimethyl-[(1R,2S)-2-undecyIcyclopropyl]tetradecan-5-amine, N,N-dimethyl-3-{7-[(1 S,2R)-2-octylcyclopropyl]heptyl}dodecan-1-amine, 1-[(1R,2S)-2-heptylcyclopropyl]-N,N-dimethyloctadecan-9-amine, 1-[(1S,2R)-2-decylcyclopropyl]-N,N-dimethylpentadecan-6-amine, N,N-dimethyl-1-[(1S,2R)-2-octylcyclopropyl]pentadecan-8-amine, R—N,N-dimethyl-1-[(9Z,12Z)-octadeca-9,12-dien-1-yloxy]-3-(octyloxy)propan-2-amine, S—N,N-dimethyl-1-[(9Z,12Z)-octadeca-9,12-dien-1-yloxy]-3-(octyloxy)propan-2-amine, 1-{2-[(9Z,12Z)-octadeca-9,12-dien-1-yloxy]-1-[(octyloxy)methyl]ethyl}pyrrolidine, (2 S)—N,N-dimethyl-1-[(9Z,12Z)-octadeca-9,12-dien-1-yloxy]-3-[(5Z)-oct-5-en-1-yloxy]propan-2-amine, 1-{2-[(9Z,12Z)-octadeca-9,12-dien-1-yloxy]-1-[(octyloxy)methyl]ethyl}azetidine, (2 S)-1-(hexyloxy)-N,N-dimethyl-3-[(9Z,12Z)-octadeca-9,12-dien-1-yloxy]propan-2-amine, (2S)-1-(heptyloxy)-N,N-dimethyl-3-[(9Z,12Z)-octadeca-9,12-dien-1-yloxy]propan-2-amine, N,N-dimethyl-1-(nonyloxy)-3-[(9Z,12Z)-octadeca-9,12-dien-1-yloxy]propan-2-amine, N,N-dimethyl-1-[(9Z)-octadec-9-en-1-yloxy]-3-(octyloxy)propan-2-amine; (2S)—N,N-dimethyl-1-[(6Z,9Z,12Z)-octadeca-6,9,12-trien-1-yloxy]-3-(octyloxy)propan-2-amine, (2S)-1-[(11Z,14Z)-icosa-11,14-dien-1-yloxy]-N,N-dimethyl-3-(pentyloxy)propan-2-amine, (2S)-1-(hexyloxy)-3-[(11Z,14Z)-icosa-11,14-dien-1-yloxy]-N,N-dimethylpropan-2-amine, 1-[(11Z,14Z)-icosa-11,14-dien-1-yloxy]-N,N-dimethyl-3-(octyloxy)propan-2-amine, 1-[(13Z,16Z)-docosa-13,16-dien-1-yloxy]-N,N-dimethyl-3-(octyloxy)propan-2-amine, (2S)-1-[(13Z,16Z)-docosa-13,16-dien-1-yloxy]-3-(hexyloxy)-N,N-dimethylpropan-2-amine, (2 S)-1-[(13Z)-docos-13-en-1-yloxy]-3-(hexyloxy)-N,N-dimethylpropan-2-amine, 1-[(13Z)-docos-13-en-1-yloxy]-N,N-dimethyl-3-(octyloxy)propan-2-amine, 1-[(9Z)-hexadec-9-en-1-yloxy]-N,N-dimethyl-3-(octyloxy)propan-2-amine, (2R)—N,N-dimethyl-H(1-metoyloctyl)oxy]-3-[(9Z,12Z)-octadeca-9,12-dien-1-yloxy]propan-2-amine, (2R)-1-[(3,7-dimethyloctyl)oxy]-N,N-dimethyl-3-[(9Z,12Z)-octadeca-9,12-dien-1-yloxy]propan-2-amine, N,N-dimethyl-1-(octyloxy)-3-({8-[(1S,2S)-2-{[(1R,2R)-2-pentylcyclopropyl]methyl}cyclopropyl]octyl}oxy)propan-2-amine, N,N-dimethyl-1-{[8-(2-oclylcyclopropyl)octyl]oxy}-3-(octyloxy)propan-2-amine and (11E,20Z,23Z)—N,N-dimethylnonacosa-11,20,2-trien-10-amine or a pharmaceutically acceptable salt or stereoisomer thereof

[0416] In one embodiment, the cationic lipid may be synthesized by methods known in the art and/or as described in International Publication Nos. WO2012040184, WO2011153120, WO2011149733, WO2011090965, WO2011043913, WO2011022460, WO2012061259, WO2012054365, WO2012044638, WO2010080724 and WO201021865; each of which is herein incorporated by reference in their entirety.

[0417] In one embodiment, the LNP formulation may contain PEG-c-DOMG at 3% lipid molar ratio. In another embodiment, the LNP formulation may contain PEG-c-DOMG at 1.5% lipid molar ratio.

[0418] In one embodiment, the LNP formulation may contain PEG-DMG 2000 (1,2-dimyristoyl-sn-glycero-3-phophoethanolamine-N-[methoxy(polyethylene glycol)-2000). In one embodiment, the LNP formulation may contain PEG-DMG 2000, a cationic lipid known in the art and at least one other component. In another embodiment, the LNP formulation may contain PEG-DMG 2000, a cationic lipid known in the art, DSPC and cholesterol. As a non-limiting example, the LNP formulation may contain PEG-DMG 2000, DLin-DMA, DSPC and cholesterol. As another non-limiting example the LNP formulation may contain PEG-DMG 2000, DLin-DMA, DSPC and cholesterol in a molar ratio of 2:40:10:48 (see e.g. Geall et al., Nonviral delivery of self-amplifying RNA vaccines, PNAS 2012; PMID: 22908294; herein incorporated by reference in its entirety).

[0419] In one embodiment, the LNP formulation may be formulated by the methods described in International Publication Nos. WO2011127255 or WO2008103276, each of which is herein incorporated by reference in their entirety. As a non-limiting example, modified RNA described herein may be encapsulated in LNP formulations as described in WO2011127255 and/or WO2008103276; each of which is herein incorporated by reference in their entirety. As another non-limiting example, modified RNA described herein may be formulated in a nanoparticle to be delivered by a parenteral route as described in U.S. Pub. No. 20120207845; herein incorporated by reference in its entirety.

[0420] In one embodiment, LNP formulations described herein may comprise a polycationic composition. As a non-limiting example, the polycationic composition may be selected from formula I-60 of US Patent Publication No. US20050222064; herein incorporated by reference in its entirety. In another embodiment, the LNP formulations comprising a polycationic composition may be used for the delivery of the modified RNA described herein in vivo and/or in vitro.

[0421] In one embodiment, the LNP formulations described herein may additionally comprise a permeability enhancer molecule. Non-limiting permeability enhancer molecules are described in US Patent Publication No. US20050222064; herein incorporated by reference in its entirety.

[0422] In one embodiment, the pharmaceutical compositions may be formulated in liposomes such as, but not limited to, DiLa2 liposomes (Marina Biotech, Bothell, Wash.), SMARTICLES® (Marina Biotech, Bothell, Wash.), neutral DOPC (1,2-dioleoyl-sn-glycero-3-phosphocholine) based liposomes (e.g., siRNA delivery for ovarian cancer (Landen et al. Cancer Biology & Therapy 2006 5 (12) 1708-1713); herein incorporated by reference in its entirety) and hyaluronan-coated liposomes (Quiet Therapeutics, Israel).

[0423] The nanoparticle formulations may be a carbohydrate nanoparticle comprising a carbohydrate carrier and a modified nucleic acid molecule (e.g., mRNA). As a non-limiting example, the carbohydrate carrier may include, but is not limited to, an anhydride-modified phytoglycogen or glycogen-type material, phtoglycogen octenyl succinate, phytoglycogen beta-dextrin, anhydride-modified phytoglycogen beta-dextrin. (See e.g., International Publication No. WO2012109121; herein incorporated by reference in its entirety).

[0424] Lipid nanoparticle formulations may be improved by replacing the cationic lipid with a biodegradable cationic lipid which is known as a rapidly eliminated lipid nanoparticle (reLNP). Ionizable cationic lipids, such as, but not limited to, DLinDMA, DLin-KC2-DMA, and DLin-MC3-DMA, have been shown to accumulate in plasma and tissues over time and may be a potential source of toxicity. The rapid metabolism of the rapidly eliminated lipids can improve the tolerability and therapeutic index of the lipid nanoparticles by an order of magnitude from a 1 mg/kg dose to a 10 mg/kg dose in rat. Inclusion of an enzymatically degraded ester linkage can improve the degradation and metabolism profile of the cationic component, while still maintaining the activity of the reLNP formulation. The ester linkage can be internally located within the lipid chain or it may be terminally located at the terminal end of the lipid chain. The internal ester linkage may replace any carbon in the lipid chain.

[0425] In one embodiment, the internal ester linkage may be located on either side of the saturated carbon. Non-limiting examples of reLNPs include,

[chemical structure]

[0426] In one embodiment, an immune response may be elicited by delivering a lipid nanoparticle which may include a nanospecies, a polymer and an immunogen. (U.S. Publication No. 20120189700 and International Publication No. WO2012099805; each of which is herein incorporated by reference in their entirety). The polymer may encapsulate the nanospecies or partially encapsulate the nanospecies. The immunogen may be a recombinant protein, a modified RNA described herein. In one embodiment, the lipid nanoparticle may be formulated for use in a vaccine such as, but not limited to, against a pathogen.

[0427] Lipid nanoparticles may be engineered to alter the surface properties of particles so the lipid nanoparticles may penetrate the mucosal barrier. Mucus is located on mucosal tissue such as, but not limited to, oral (e.g., the buccal and esophageal membranes and tonsil tissue), ophthalmic, gastrointestinal (e.g., stomach, small intestine, large intestine, colon, rectum), nasal, respiratory (e.g., nasal, pharyngeal, tracheal and bronchial membranes), genital (e.g., vaginal, cervical and urethral membranes). Nanoparticles larger than 10-200 nm which are preferred for higher drug encapsulation efficiency and the ability to provide the sustained delivery of a wide array of drugs have been thought to be too large to rapidly diffuse through mucosal barriers. Mucus is continuously secreted, shed, discarded or digested and recycled so most of the trapped particles may be removed from the mucosla tissue within seconds or within a few hours. Large polymeric nanoparticles (200 nm-500 nm in diameter) which have been coated densely with a low molecular weight polyethylene glycol (PEG) diffused through mucus only 4 to 6-fold lower than the same particles diffusing in water (Lai et al. PNAS 2007 104(5):1482-487; Lai et al. Adv Drug Deliv Rev. 2009 61(2): 158-171; each of which is herein incorporated by reference in their entirety). The transport of nanoparticles may be determined using rates of permeation and/or fluorescent microscopy techniques including, but not limited to, fluorescence recovery after photobleaching (FRAP) and high resolution multiple particle tracking (MPT). As a non-limiting example, compositions which can penetrate a mucosal barrier may be made as described in U.S. Pat. No. 8,241,670, herein incorporated by reference in its entirety.

[0428] The lipid nanoparticle engineered to penetrate mucus may comprise a polymeric material (i.e. a polymeric core) and/or a polymer-vitamin conjugate and/or a tri-block co-polymer. The polymeric material may include, but is not limited to, polyamines, polyethers, polyamides, polyesters, polycarbamates, polyureas, polycarbonates, poly(styrenes), polyimides, polysulfones, polyurethanes, polyacetylenes, polyethylenes, polyethyeneimines, polyisocyanates, polyacrylates, polymethacrylates, polyacrylonitriles, and polyarylates. The polymeric material may be biodegradable and/or biocompatible. The polymeric material may additionally be irradiated. As a non-limiting example, the polymeric material may be gamma irradiated (See e.g., International App. No. WO201282165, herein incorporated by reference in its entirety). Non-limiting examples of specific polymers include poly(caprolactone) (PCL), ethylene vinyl acetate polymer (EVA), poly(lactic acid) (PLA), poly(L-lactic acid) (PLLA), poly(glycolic acid) (PGA), poly(lactic acid-co-glycolic acid) (PLGA), poly(L-lactic acid-co-glycolic acid) (PLLGA), poly(D,L-lactide) (PDLA), poly(L-lactide) (PLLA), poly(D,L-lactide-co-caprolactone), poly(D,L-lactide-co-caprolactone-co-glycolide), poly(D,L-lactide-co-PEO-co-D,L-lactide), poly(D,L-lactide-co-PPO-co-D,L-lactide), polyalkyl cyanoacralate, polyurethane, poly-L-lysine (PLL), hydroxypropyl methacrylate (HPMA), polyethyleneglycol, poly-L-glutamic acid, poly(hydroxy acids), polyanhydrides, polyorthoesters, poly(ester amides), polyamides, poly(ester ethers), polycarbonates, polyalkylenes such as polyethylene and polypropylene, polyalkylene glycols such as poly(ethylene glycol) (PEG), polyalkylene oxides (PEO), polyalkylene terephthalates such as poly(ethylene terephthalate), polyvinyl alcohols (PVA), polyvinyl ethers, polyvinyl esters such as poly(vinyl acetate), polyvinyl halides such as poly(vinyl chloride) (PVC), polyvinylpyrrolidone, polysiloxanes, polystyrene (PS), polyurethanes, derivatized celluloses such as alkyl celluloses, hydroxyalkyl celluloses, cellulose ethers, cellulose esters, nitro celluloses, hydroxypropylcellulose, carboxymethylcellulose, polymers of acrylic acids, such as poly(methyl(meth)acrylate) (PMMA), poly(ethyl(meth)acrylate), poly(butyl(meth)acrylate), poly(isobutyl(meth)acrylate), poly(hexyl(meth)acrylate), poly(isodecyl(meth)acrylate), poly(lauryl(meth)acrylate), poly(phenyl(meth)acrylate), poly(methyl acrylate), poly(isopropyl acrylate), poly(isobutyl acrylate), poly(octadecyl acrylate) and copolymers and mixtures thereof, polydioxanone and its copolymers, polyhydroxyalkanoates, polypropylene fumarate, polyoxymethylene, poloxamers, poly(ortho)esters, poly(butyric acid), poly(valeric acid), poly(lactide-co-caprolactone), and trimethylene carbonate, polyvinylpyrrolidone. The lipid nanoparticle may be coated or associated with a co-polymer such as, but not limited to, a block co-polymer, and (poly(ethylene glycol))-(poly(propylene oxide))-(poly(ethylene glycol)) triblock copolymer (see e.g., US Publication 20120121718 and US Publication 20100003337 and U.S. Pat. No. 8,263,665; each of which is herein incorporated by reference in their entirety). The co-polymer may be a polymer that is generally regarded as safe (GRAS) and the formation of the lipid nanoparticle may be in such a way that no new chemical entities are created. For example, the lipid nanoparticle may comprise poloxamers coating PLGA nanoparticles without forming new chemical entities which are still able to rapidly penetrate human mucus (Yang et al. Angew. Chem. Int. Ed. 2011 50:2597-2600; herein incorporated by reference in its entirety).

[0429] The vitamin of the polymer-vitamin conjugate may be vitamin E. The vitamin portion of the conjugate may be substituted with other suitable components such as, but not limited to, vitamin A, vitamin E, other vitamins, cholesterol, a hydrophobic moiety, or a hydrophobic component of other surfactants (e.g., sterol chains, fatty acids, hydrocarbon chains and alkylene oxide chains).

[0430] The lipid nanoparticle engineered to penetrate mucus may include surface altering agents such as, but not limited to, mRNA, anionic proteins (e.g., bovine serum albumin), surfactants (e.g., cationic surfactants such as for example dimethyldioctadecyl-ammonium bromide), sugars or sugar derivatives (e.g., cyclodextrin), nucleic acids, polymers (e.g., heparin, polyethylene glycol and poloxamer), mucolytic agents (e.g., N-acetylcysteine, mugwort, bromelain, papain, clerodendrum, acetylcysteine, bromhexine, carbocisteine, eprazinone, mesna, ambroxol, sobrerol, domiodol, letosteine, stepronin, tiopronin, gelsolin, thymosin β4 dornase alfa, neltenexine, erdosteine) and various DNases including rhDNase. The surface altering agent may be embedded or enmeshed in the particle's surface or disposed (e.g., by coating, adsorption, covalent linkage, or other process) on the surface of the lipid nanoparticle. (see e.g., US Publication 20100215580 and US Publication 20080166414; each of which is herein incorporated by reference in their entirety).

[0431] The mucus penetrating lipid nanoparticles may comprise at least one mRNA described herein. The mRNA may be encapsulated in the lipid nanoparticle and/or disposed on the surface of the particle. The mRNA may be covalently coupled to the lipid nanoparticle. Formulations of mucus penetrating lipid nanoparticles may comprise a plurality of nanoparticles. Further, the formulations may contain particles which may interact with the mucus and alter the structural and/or adhesive properties of the surrounding mucus to decrease mucoadhesion which may increase the delivery of the mucus penetrating lipid nanoparticles to the mucosal tissue.

[0432] In one embodiment, the modified nucleic acid molecule or mRNA is formulated as a lipoplex, such as, without limitation, the ATUPLEX™ system, the DACC system, the DBTC system and other siRNA-lipoplex technology from Silence Therapeutics (London, United Kingdom), STEMFECT™ from STEMGENT® (Cambridge, Mass.), and polyethylenimine (PEI) or protamine-based targeted and non-targeted delivery of nucleic acids (Aleku et al. Cancer Res. 2008 68:9788-9798; Strumberg et al. Int J Clin Pharmacol Ther 2012 50:76-78; Santel et al., Gene Ther 2006 13:1222-1234; Santel et al., Gene Ther 2006 13:1360-1370; Gutbier et al., Pulm Pharmacol. Ther. 2010 23:334-344; Kaufmann et al. Microvasc Res 2010 80:286-293Weide et al. J. Immunother. 2009 32:498-507; Weide et al. J. Immunother. 2008 31:180-188; Pascolo Expert Opin. Biol. Ther. 4:1285-1294; Fotin-Mleczek et al., 2011 J. Immunother. 34:1-15; Song et al., Nature Biotechnol. 2005, 23:709-717; Peer et al., Proc Natl Acad Sci USA. 2007 6; 104:4095-4100; deFougerolles Hum Gene Ther. 2008 19:125-132; all of which are incorporated herein by reference in its entirety).

[0433] In one embodiment such formulations may also be constructed or compositions altered such that they passively or actively are directed to different cell types in vivo, including but not limited to hepatocytes, immune cells, tumor cells, endothelial cells, antigen presenting cells, and leukocytes (Akinc et al. Mol. Ther. 2010 18:1357-1364; Song et al., Nat. Biotechnol. 2005 23:709-717; Judge et al., J Clin Invest. 2009 119:661-673; Kaufmann et al., Microvasc Res 2010 80:286-293; Santel et al., Gene Ther 2006 13:1222-1234; Santel et al., Gene Ther 2006 13:1360-1370; Gutbier et al., Pulm Pharmacol. Ther. 2010 23:334-344; Basha et al., Mol. Ther. 2011 19:2186-2200; Fenske and Cullis, Expert Opin Drug Deliv. 2008 5:25-44; Peer et al., Science. 2008 319:627-630; Peer and Lieberman, Gene Ther. 2011 18:1127-1133; all of which are incorporated herein by reference in its entirety). One example of passive targeting of formulations to liver cells includes the DLin-DMA, DLin-KC2-DMA and DLin-MC3-DMA-based lipid nanoparticle formulations which have been shown to bind to apolipoprotein E and promote binding and uptake of these formulations into hepatocytes in vivo (Akinc et al. Mol. Ther. 2010 18:1357-1364; herein incorporated by reference in its entirety). Formulations can also be selectively targeted through expression of different ligands on their surface as exemplified by, but not limited by, folate, transferrin, N-acetylgalactosamine (GalNAc), and antibody targeted approaches (Kolhatkar et al., Curr Drug Discov Technol. 2011 8:197-206; Musacchio and Torchilin, Front Biosci. 2011 16:1388-1412; Yu et al., Mol Membr Biol. 2010 27:286-298; Patil et al., Crit. Rev Ther Drug Carrier Syst. 2008 25:1-61; Benoit et al., Biomacromolecules. 2011 12:2708-2714; Zhao et al., Expert Opin Drug Deliv. 2008 5:309-319; Akinc et al., Mol. Ther. 2010 18:1357-1364; Srinivasan et al., Methods Mol. Biol. 2012 820:105-116; Ben-Arie et al., Methods Mol. Biol. 2012 757:497-507; Peer 2010 J Control Release. 20:63-68; Peer et al., Proc Natl Acad Sci USA. 2007 104:4095-4100; Kim et al., Methods Mol. Biol. 2011 721:339-353; Subramanya et al., Mol. Ther. 2010 18:2028-2037; Song et al., Nat. Biotechnol. 2005 23:709-717; Peer et al., Science. 2008 319:627-630; Peer and Lieberman, Gene Ther. 2011 18:1127-1133; all of which are incorporated herein by reference in its entirety).

[0434] In one embodiment, the modified nucleic acid molecules or mRNA are formulated as a solid lipid nanoparticle. A solid lipid nanoparticle (SLN) may be spherical with an average diameter between 10 to 1000 nm. SLN possess a solid lipid core matrix that can solubilize lipophilic molecules and may be stabilized with surfactants and/or emulsifiers. In a further embodiment, the lipid nanoparticle may be a self-assembly lipid-polymer nanoparticle (see Zhang et al., ACS Nano, 2008, 2 (8), pp 1696-1702; herein incorporated by reference in its entirety).

[0435] Liposomes, lipoplexes, or lipid nanoparticles may be used to improve the efficacy of modified nucleic acid molecules or mRNA directed protein production as these formulations may be able to increase cell transfection by the modified nucleic acid molecule or mRNA; and/or increase the translation of encoded protein. One such example involves the use of lipid encapsulation to enable the effective systemic delivery of polyplex plasmid DNA (Heyes et al., Mol. Ther. 2007 15:713-720; herein incorporated by reference in its entirety). The liposomes, lipoplexes, or lipid nanoparticles may also be used to increase the stability of the modified nucleic acid molecules or mRNA.

[0436] In one embodiment, the modified nucleic acid molecules and/or the mRNA of the present invention can be formulated for controlled release and/or targeted delivery. As used herein, “controlled release” refers to a pharmaceutical composition or compound release profile that conforms to a particular pattern of release to effect a therapeutic outcome. In one embodiment, the modified nucleic acids molecules or the mRNA may be encapsulated into a delivery agent described herein and/or known in the art for controlled release and/or targeted delivery. As used herein, the term “encapsulate” means to enclose, surround or encase. As it relates to the formulation of the compounds of the invention, encapsulation may be substantial, complete or partial. The term “substitantially encapsulated” means that at least greater than 50, 60, 70, 80, 85, 90, 95, 96, 97, 98, 99, 99.9, 99.9 or greater than 99.999% of the pharmaceutical composition or compound of the invention may be enclosed, surrounded or encased within the delivery agent. “Partially encapsulation” means that less than 10, 10, 20, 30, 40 50 or less of the pharmaceutical composition or compound of the invention may be enclosed, surrounded or encased within the delivery agent. Advantageously, encapsulation may be determined by measuring the escape or the activity of the pharmaceutical composition or compound of the invention using fluorescence and/or electron micrograph. For example, at least 1, 5, 10, 20, 30, 40, 50, 60, 70, 80, 85, 90, 95, 96, 97, 98, 99, 99.9, 99.99 or greater than 99.99% of the pharmaceutical composition or compound of the invention are encapsulated in the delivery agent.

[0437] In one embodiment, the controlled release formulation may include, but is not limited to, tri-block co-polymers. As a non-limiting example, the formulation may include two different types of tri-block co-polymers (International Pub. No. WO2012131104 and WO2012131106; each of which is herein incorporated by reference in its entirety).

[0438] In another embodiment, the modified nucleic acid molecules or the mRNA may be encapsulated into a lipid nanoparticle or a rapidly eliminated lipid nanoparticle and the lipid nanoparticles or a rapidly eliminated lipid nanoparticle may then be encapsulated into a polymer, hydrogel and/or surgical sealant described herein and/or known in the art. As a non-limiting example, the polymer, hydrogel or surgical sealant may be PLGA, ethylene vinyl acetate (EVAc), poloxamer, GELSITE® (Nanotherapeutics, Inc. Alachua, Fla.), HYLENEX® (Halozyme Therapeutics, San Diego Calif.), surgical sealants such as fibrinogen polymers (Ethicon Inc. Cornelia, Ga.), TISSELL® (Baxter International, Inc Deerfield, Ill.), PEG-based sealants, and COSEAL® (Baxter International, Inc Deerfield, Ill.).

[0439] In another embodiment, the lipid nanoparticle may be encapsulated into any polymer known in the art which may form a gel when injected into a subject. As a non-limiting example, the lipid nanoparticle may be encapsulated into a polymer matrix which may be biodegradable.

[0440] In one embodiment, the modified nucleic acid molecules or mRNA formulation for controlled release and/or targeted delivery may also include at least one controlled release coating. Controlled release coatings include, but are not limited to, OPADRY®, polyvinylpyrrolidone/vinyl acetate copolymer, polyvinylpyrrolidone, hydroxypropyl methylcellulose, hydroxypropyl cellulose, hydroxyethyl cellulose, EUDRAGIT RL®, EUDRAGIT RS® and cellulose derivatives such as ethylcellulose aqueous dispersions (AQUACOAT® and SURELEASE®).

[0441] In one embodiment, the controlled release and/or targeted delivery formulation may comprise at least one degradable polyester which may contain polycationic side chains. Degradeable polyesters include, but are not limited to, poly(serine ester), poly(L-lactide-co-L-lysine), poly(4-hydroxy-L-proline ester), and combinations thereof. In another embodiment, the degradable polyesters may include a PEG conjugation to form a PEGylated polymer.

[0442] In one embodiment, the modified nucleic acid molecules and/or the mRNA of the present invention may be encapsulated in a therapeutic nanoparticle. Therapeutic nanoparticles may be formulated by methods described herein and known in the art such as, but not limited to, International Pub Nos. WO2010005740, WO2010030763, WO2010005721, WO2010005723, WO2012054923, US Pub. Nos. US20110262491, US20100104645, US20100087337, US20100068285, US20110274759, US20100068286 and US20120288541, and U.S. Pat. Nos. 8,206,747, 8,293,276 8,318,208 and 8,318,211; each of which is herein incorporated by reference in their entirety. In another embodiment, therapeutic polymer nanoparticles may be identified by the methods described in US Pub No. US20120140790, herein incorporated by reference in its entirety.

[0443] In one embodiment, the therapeutic nanoparticle may be formulated for sustained release. As used herein, “sustained release” refers to a pharmaceutical composition or compound that conforms to a release rate over a specific period of time. The period of time may include, but is not limited to, hours, days, weeks, months and years. As a non-limiting example, the sustained release nanoparticle may comprise a polymer and a therapeutic agent such as, but not limited to, the modified nucleic acid molecules and mRNA of the present invention (see International Pub No. 2010075072 and US Pub No. US20100216804, US20110217377 and US20120201859, each of which is herein incorporated by reference in their entirety).

[0444] In one embodiment, the therapeutic nanoparticles may be formulated to be target specific. As a non-limiting example, the thereapeutic nanoparticles may include a corticosteroid (see International Pub. No. WO2011084518 herein incorporated by reference in its entirety). In one embodiment, the therapeutic nanoparticles of the present invention may be formulated to be cancer specific. As a non-limiting example, the therapeutic nanoparticles may be formulated in nanoparticles described in International Pub No. WO2008121949, WO2010005726, WO2010005725, WO2011084521 and US Pub No. US20100069426, US20120004293 and US20100104655, each of which is herein incorporated by reference in their entirety.

[0445] In one embodiment, the nanoparticles of the present invention may comprise a polymeric matrix. As a non-limiting example, the nanoparticle may comprise two or more polymers such as, but not limited to, polyethylenes, polycarbonates, polyanhydrides, polyhydroxyacids, polypropylfumerates, polycaprolactones, polyamides, polyacetals, polyethers, polyesters, poly(orthoesters), polycyanoacrylates, polyvinyl alcohols, polyurethanes, polyphosphazenes, polyacrylates, polymethacrylates, polycyanoacrylates, polyureas, polystyrenes, polyamines, polylysine, poly(ethylene imine), poly(serine ester), poly(L-lactide-co-L-lysine), poly(4-hydroxy-L-proline ester) or combinations thereof.

[0446] In one embodiment, the therapeutic nanoparticle comprises a diblock copolymer. In one embodiment, the diblock copolymer may include PEG in combination with a polymer such as, but not limited to, polyethylenes, polycarbonates, polyanhydrides, polyhydroxyacids, polypropylfumerates, polycaprolactones, polyamides, polyacetals, polyethers, polyesters, poly(orthoesters), polycyanoacrylates, polyvinyl alcohols, polyurethanes, polyphosphazenes, polyacrylates, polymethacrylates, polycyanoacrylates, polyureas, polystyrenes, polyamines, polylysine, poly(ethylene imine), poly(serine ester), poly(L-lactide-co-L-lysine), poly(4-hydroxy-L-proline ester) or combinations thereof.

[0447] As a non-limiting example the therapeutic nanoparticle comprises a PLGA-PEG block copolymer (see US Pub. No. US20120004293 and U.S. Pat. No. 8,236,330, each of which is herein incorporated by reference in their entirety). In another non-limiting example, the therapeutic nanoparticle is a stealth nanoparticle comprising a diblock copolymer of PEG and PLA or PEG and PLGA (see U.S. Pat. No. 8,246,968, herein incorporated by reference in its entirety).

[0448] In one embodiment, the therapeutic nanoparticle may comprise a multiblock copolymer (See e.g., U.S. Pat. Nos. 8,263,665 and 8,287,910; each of which is herein incorporated by reference in its entirety).

[0449] In one embodiment, the block copolymers described herein may be included in a polyion complex comprising a non-polymeric micelle and the block copolymer. (See e.g., U.S. Pub. No. 20120076836; herein incorporated by reference in its entirety).

[0450] In one embodiment, the therapeutic nanoparticle may comprise at least one acrylic polymer. Acrylic polymers include but are not limited to, acrylic acid, methacrylic acid, acrylic acid and methacrylic acid copolymers, methyl methacrylate copolymers, ethoxyethyl methacrylates, cyanoethyl methacrylate, amino alkyl methacrylate copolymer, poly(acrylic acid), poly(methacrylic acid), polycyanoacrylates and combinations thereof.

[0451] In one embodiment, the therapeutic nanoparticles may comprise at least one cationic polymer described herein and/or known in the art.

[0452] In one embodiment, the therapeutic nanoparticles may comprise at least one amine-containing polymer such as, but not limited to polylysine, polyethylene imine, poly(amidoamine) dendrimers, poly(beta-amino esters) (See e.g., U.S. Pat. No. 8,287,849; herein incorporated by reference in its entirety) and combinations thereof.

[0453] In one embodiment, the therapeutic nanoparticles may comprise at least one degradable polyester which may contain polycationic side chains. Degradeable polyesters include, but are not limited to, poly(serine ester), poly(L-lactide-co-L-lysine), poly(4-hydroxy-L-proline ester), and combinations thereof. In another embodiment, the degradable polyesters may include a PEG conjugation to form a PEGylated polymer.

[0454] In another embodiment, the therapeutic nanoparticle may include a conjugation of at least one targeting ligand. The targeting ligand may be any ligand known in the art such as, but not limited to, a monoclonal antibody. (Kirpotin et al, Cancer Res. 2006 66:6732-6740; herein incorporated by reference in its entirety).

[0455] In one embodiment, the therapeutic nanoparticle may be formulated in an aqueous solution which may be used to target cancer (see International Pub No. WO2011084513 and US Pub No. US20110294717, each of which is herein incorporated by reference in their entirety).

[0456] In one embodiment, the modified nucleic acid molecules or mRNA may be encapsulated in, linked to and/or associated with synthetic nanocarriers. Synthetic nanocarriers include, but are not limited to, those described in International Pub. Nos. WO2010005740, WO2010030763, WO201213501, WO2012149252, WO2012149255, WO2012149259, WO2012149265, WO2012149268, WO2012149282, WO2012149301, WO2012149393, WO2012149405, WO2012149411 and WO2012149454 and US Pub. Nos. US20110262491, US20100104645, US20100087337 and US20120244222, each of which is herein incorporated by reference in their entirety. The synthetic nanocarriers may be formulated using methods known in the art and/or described herein. As a non-limiting example, the synthetic nanocarriers may be formulated by the methods described in International Pub Nos. WO2010005740, WO2010030763 and WO201213501 and US Pub. Nos. US20110262491, US20100104645, US20100087337 and US20120244222, each of which is herein incorporated by reference in their entirety. In another embodiment, the synthetic nanocarrier formulations may be lyophilized by methods described in International Pub. No. WO2011072218 and U.S. Pat. No. 8,211,473; each of which is herein incorporated by reference in their entirety.

[0457] In one embodiment, the synthetic nanocarriers may contain reactive groups to release the modified nucleic acid molecules and/or mRNA described herein (see International Pub. No. WO20120952552 and US Pub No. US20120171229, each of which is herein incorporated by reference in their entirety).

[0458] In one embodiment, the synthetic nanocarriers may contain an immunostimulatory agent to enhance the immune response from delivery of the synthetic nanocarrier. As a non-limiting example, the synthetic nanocarrier may comprise a Th1 immunostimulatory agent which may enhance a Th1-based response of the immune system (see International Pub No. WO2010123569 and US Pub. No. US20110223201, each of which is herein incorporated by reference in its entirety).

[0459] In one embodiment, the synthetic nanocarriers may be formulated for targeted release. In one embodiment, the synthetic nanocarrier is formulated to release the modified nucleic acid molecules and/or mRNA at a specified pH and/or after a desired time interval. As a non-limiting example, the synthetic nanoparticle may be formulated to release the modified mRNA molecules and/or mRNA after 24 hours and/or at a pH of 4.5 (see International Pub. Nos. WO2010138193 and WO2010138194 and US Pub Nos. US20110020388 and US20110027217, each of which is herein incorporated by reference in their entirety).

[0460] In one embodiment, the synthetic nanocarriers may be formulated for controlled and/or sustained release of the modified nucleic acid molecules and/or mRNA described herein. As a non-limiting example, the synthetic nanocarriers for sustained release may be formulated by methods known in the art, described herein and/or as described in International Pub No. WO2010138192 and US Pub No. 20100303850, each of which is herein incorporated by reference in their entirety.

[0461] In one embodiment, the synthetic nanocarrier may be formulated for use as a vaccine. In one embodiment, the synthetic nanocarrier may encapsulate at least one modified nucleic acid molecule and/or mRNA which encodes at least one antigen. As a non-limiting example, the synthetic nanocarrier may include at least one antigen and an excipient for a vaccine dosage form (see International Pub No. WO2011150264 and US Pub No. US20110293723, each of which is herein incorporated by reference in their entirety). As another non-limiting example, a vaccine dosage form may include at least two synthetic nanocarriers with the same or different antigens and an excipient (see International Pub No. WO2011150249 and US Pub No. US20110293701, each of which is herein incorporated by reference in their entirety). The vaccine dosage form may be selected by methods described herein, known in the art and/or described in International Pub No. WO2011150258 and US Pub No. US20120027806, each of which is herein incorporated by reference in their entirety).

[0462] In one embodiment, the synthetic nanocarrier may comprise at least one modified nucleic acid molecule and/or mRNA which encodes at least one adjuvant. In another embodiment, the synthetic nanocarrier may comprise at least one modified nucleic molecule acid and/or mRNA and an adjuvant. As a non-limiting example, the synthetic nanocarrier comprising and adjuvant may be formulated by the methods described in International Pub No. WO2011150240 and US Pub No. US20110293700, each of which is herein incorporated by reference in its entirety.

[0463] In one embodiment, the synthetic nanocarrier may encapsulate at least one modified nucleic acid molecule and/or mRNA which encodes a peptide, fragment or region from a virus. As a non-limiting example, the synthetic nanocarrier may include, but is not limited to, the nanocarriers described in International Pub No. WO2012024621, WO201202629, WO2012024632 and US Pub No. US20120064110, US20120058153 and US20120058154, each of which is herein incorporated by reference in their entirety.

[0464] In one embodiment, the nanoparticle may be optimized for oral administration. The nanoparticle may comprise at least one cationic biopolymer such as, but not limited to, chitosan or a derivative thereof. As a non-limiting example, the nanoparticle may be formulated by the methods described in U.S. Pub. No. 20120282343; herein incorporated by reference in its entirety.

### Polymers, Biodegradable Nanoparticles, and Core-Shell Nanoparticles

[0465] The modified nucleic acid molecules and mRNA of the invention can be formulated using natural and/or synthetic polymers. Non-limiting examples of polymers which may be used for delivery include, but are not limited to, DYNAMIC POLYCONJUGATE® (Arrowhead Research Corp., Pasadena, Calif.) formulations from MIRUS® Bio (Madison, Wis.) and Roche Madison (Madison, Wis.), PHASERX™ polymer formulations such as, without limitation, SMARTT POLYMER TECHNOLOGY™ (Seattle, Wash.), DMRI/DOPE, poloxamer, VAXFECTIN® adjuvant from Vical (San Diego, Calif.), chitosan, cyclodextrin from Calando Pharmaceuticals (Pasadena, Calif.), dendrimers and poly(lactic-co-glycolic acid) (PLGA) polymers, RONDEL™ (RNAi/Oligonucleotide Nanoparticle Delivery) polymers (Arrowhead Research Corporation, Pasadena, Calif.) and pH responsive co-block polymers such as, but not limited to, PHASERX™ (Seattle, Wash.).

[0466] A non-limiting example of chitosan formulation includes a core of positively charged chitosan and an outer portion of negatively charged substrate (U.S. Pub. No. 20120258176; herein incorporated by reference in its entirety). Chitosan includes, but is not limited to N-trimethyl chitosan, mono-N-carboxymethyl chitosan (MCC), N-palmitoyl chitosan (NPCS), EDTA-chitosan, low molecular weight chitosan, chitosan derivatives, or combinations thereof.

[0467] In one embodiment, the polymers used in the present invention have undergone processing to reduce and/or inhibit the attachment of unwanted substances such as, but not limited to, bacteria, to the surface of the polymer. The polymer may be processed by methods known and/or described in the art and/or described in International Pub. No. WO2012150467, herein incorporated by reference in its entirety.

[0468] A non-limiting example of PLGA formulations include, but are not limited to, PLGA injectable depots (e.g., ELIGARD® which is formed by dissolving PLGA in 66% N-methyl-2-pyrrolidone (NMP) and the remainder being aqueous solvent and leuprolide. Once injected, the PLGA and leuprolide peptide precipitates into the subcutaneous space).

[0469] Many of these polymer approaches have demonstrated efficacy in delivering oligonucleotides in vivo into the cell cytoplasm (reviewed in deFougerolles Hum Gene Ther. 2008 19:125-132; herein incorporated by reference in its entirety). Two polymer approaches that have yielded robust in vivo delivery of nucleic acids, in this case with small interfering RNA (siRNA), are dynamic polyconjugates and cyclodextrin-based nanoparticles. The first of these delivery approaches uses dynamic polyconjugates and has been shown in vivo in mice to effectively deliver siRNA and silence endogenous target mRNA in hepatocytes (Rozema et al., Proc Natl Acad Sci USA. 2007 104:12982-12887; herein incorporated by reference in its entirety). This particular approach is a multicomponent polymer system whose key features include a membrane-active polymer to which nucleic acid, in this case siRNA, is covalently coupled via a disulfide bond and where both PEG (for charge masking) and N-acetylgalactosamine (for hepatocyte targeting) groups are linked via pH-sensitive bonds (Rozema et al., Proc Natl Acad Sci USA. 2007 104:12982-12887; herein incorporated by reference in its entirety). On binding to the hepatocyte and entry into the endosome, the polymer complex disassembles in the low-pH environment, with the polymer exposing its positive charge, leading to endosomal escape and cytoplasmic release of the siRNA from the polymer. Through replacement of the N-acetylgalactosamine group with a mannose group, it was shown one could alter targeting from asialoglycoprotein receptor-expressing hepatocytes to sinusoidal endothelium and Kupffer cells. Another polymer approach involves using transferrin-targeted cyclodextrin-containing polycation nanoparticles. These nanoparticles have demonstrated targeted silencing of the EWS-FLI1™ gene product in transferrin receptor-expressing Ewing's sarcoma tumor cells (Hu-Lieskovan et al., Cancer Res. 2005 65: 8984-8982; herein incorporated by reference in its entirety) and siRNA formulated in these nanoparticles was well tolerated in non-human primates (Heidel et al., Proc Natl Acad Sci USA 2007 104:5715-21; herein incorporated by reference in its entirety). Both of these delivery strategies incorporate rational approaches using both targeted delivery and endosomal escape mechanisms.

[0470] The polymer formulation can permit the sustained or delayed release of modified nucleic acid molecules or mRNA (e.g., following intramuscular or subcutaneous injection). The altered release profile for the modified nucleic acid molecule or mRNA can result in, for example, translation of an encoded protein over an extended period of time. The polymer formulation may also be used to increase the stability of the modified nucleic acid molecule or mRNA. Biodegradable polymers have been previously used to protect nucleic acids other than mRNA from degradation and been shown to result in sustained release of payloads in vivo (Rozema et al., Proc Natl Acad Sci USA. 2007 104:12982-12887; Sullivan et al., Expert Opin Drug Deliv. 2010 7:1433-1446; Convertine et al., Biomacromolecules. 2010 Oct. 1; Chu et al., Acc Chem. Res. 2012 Jan. 13; Manganiello et al., Biomaterials. 2012 33:2301-2309; Benoit et al., Biomacromolecules. 2011 12:2708-2714; Singha et al., Nucleic Acid Ther. 2011 2:133-147; deFougerolles Hum Gene Ther. 2008 19:125-132; Schaffert and Wagner, Gene Ther. 2008 16:1131-1138; Chaturvedi et al., Expert Opin Drug Deliv. 2011 8:1455-1468; Davis, Mol. Pharm. 2009 6:659-668; Davis, Nature 2010 464:1067-1070; each of which is herein incorporated by reference in its entirety).

[0471] In one embodiment, the pharmaceutical compositions may be sustained release formulations. In a further embodiment, the sustained release formulations may be for subcutaneous delivery. Sustained release formulations may include, but are not limited to, PLGA microspheres, ethylene vinyl acetate (EVAc), poloxamer, GELSITE® (Nanotherapeutics, Inc. Alachua, Fla.), HYLENEX® (Halozyme Therapeutics, San Diego Calif.), surgical sealants such as fibrinogen polymers (Ethicon Inc. Cornelia, Ga.), TISSELL® (Baxter International, Inc Deerfield, Ill.), PEG-based sealants, and COSEAL® (Baxter International, Inc Deerfield, Ill.).

[0472] As a non-limiting example modified mRNA may be formulated in PLGA microspheres by preparing the PLGA microspheres with tunable release rates (e.g., days and weeks) and encapsulating the modified mRNA in the PLGA microspheres while maintaining the integrity of the modified mRNA during the encapsulation process. EVAc are non-biodegradeable, biocompatible polymers which are used extensively in pre-clinical sustained release implant applications (e.g., extended release products Ocusert a pilocarpine ophthalmic insert for glaucoma or progestasert a sustained release progesterone intrauterine device; transdermal delivery systems Testoderm, Duragesic and Selegiline; catheters). Poloxamer F-407 NF is a hydrophilic, non-ionic surfactant triblock copolymer of polyoxyethylene-polyoxypropylene-polyoxyethylene having a low viscosity at temperatures less than 5° C. and forms a solid gel at temperatures greater than 15° C. PEG-based surgical sealants comprise two synthetic PEG components mixed in a delivery device which can be prepared in one minute, seals in 3 minutes and is reabsorbed within 30 days. GELSITE® and natural polymers are capable of in-situ gelation at the site of administration. They have been shown to interact with protein and peptide therapeutic candidates through ionic ineraction to provide a stabilizing effect.

[0473] Polymer formulations can also be selectively targeted through expression of different ligands as exemplified by, but not limited by, folate, transferrin, and N-acetylgalactosamine (GalNAc) (Benoit et al., Biomacromolecules. 2011 12:2708-2714; Rozema et al., Proc Natl Acad Sci USA. 2007 104:12982-12887; Davis, Mol. Pharm. 2009 6:659-668; Davis, Nature 2010 464:1067-1070; each of which is herein incorporated by reference in its entirety).

[0474] The modified nucleic acid molecules and mRNA of the invention may be formulated with or in a polymeric compound. The polymer may include at least one polymer such as, but not limited to, polyethenes, polyethylene glycol (PEG), poly(l-lysine)(PLL), PEG grafted to PLL, cationic lipopolymer, biodegradable cationic lipopolymer, polyethyleneimine (PEI), cross-linked branched poly(alkylene imines), a polyamine derivative, a modified poloxamer, a biodegradable polymer, elastic biodegradable polymer, biodegradable block copolymer, biodegradable random copolymer, biodegradable polyester copolymer, biodegradable polyester block copolymer, biodegradable polyester block random copolymer, multiblock copolymers, linear biodegradable copolymer, poly[α-(4-aminobutyl)-L-glycolic acid) (PAGA), biodegradable cross-linked cationic multi-block copolymers, polycarbonates, polyanhydrides, polyhydroxyacids, polypropylfumerates, polycaprolactones, polyamides, polyacetals, polyethers, polyesters, poly(orthoesters), polycyanoacrylates, polyvinyl alcohols, polyurethanes, polyphosphazenes, polyacrylates, polymethacrylates, polycyanoacrylates, polyureas, polystyrenes, polyamines, polylysine, poly(ethylene imine), poly(serine ester), poly(L-lactide-co-L-lysine), poly(4-hydroxy-L-proline ester), acrylic polymers, amine-containing polymers, dextran polymers, dextran polymer derivatives or combinations thereof.

[0475] As a non-limiting example, the modified nucleic acid molecules or mRNA of the invention may be formulated with the polymeric compound of PEG grafted with PLL as described in U.S. Pat. No. 6,177,274; herein incorporated by reference in its entirety. The formulation may be used for transfecting cells in vitro or for in vivo delivery of the modified nucleic acid molecules and mRNA. In another example, the modified nucleic acid molecules and mRNA may be suspended in a solution or medium with a cationic polymer, in a dry pharmaceutical composition or in a solution that is capable of being dried as described in U.S. Pub. Nos. 20090042829 and 20090042825; each of which are herein incorporated by reference in their entireties.

[0476] As another non-limiting example the modified nucleic acid molecules or mRNA of the invention may be formulated with a PLGA-PEG block copolymer (see US Pub. No. US20120004293 and U.S. Pat. No. 8,236,330, each of which are herein incorporated by reference in their entireties) or PLGA-PEG-PLGA block copolymers (See U.S. Pat. No. 6,004,573, herein incorporated by reference in its entirety). As a non-limiting example, the modified nucleic acid molecules or mRNA of the invention may be formulated with a diblock copolymer of PEG and PLA or PEG and PLGA (see U.S. Pat. No. 8,246,968, herein incorporated by reference in its entirety).

[0477] A polyamine derivative may be used to deliver nucleic acid molecules and/or mRNA or to treat and/or prevent a disease or to be included in an implantable or injectable device (U.S. Pub. No. 20100260817 herein incorporated by reference in its entirety). As a non-limiting example, a pharmaceutical composition may include the modified nucleic acid molecules and mRNA and the polyamine derivative described in U.S. Pub. No. 20100260817 (the contents of which are incorporated herein by reference in its entirety). As a non-limiting example the modified nucleic acids or mRNA of the present invention may be delivered using a polyaminde polymer such as, but not limited to, a polymer comprising a 1,3-dipolar addition polymer prepared by combining a carbohydrate diazide monomer with a dilkyne unite comprising oligoamines (U.S. Pat. No. 8,236,280; herein incorporated by reference in its entirety).

[0478] The modified nucleic acid molecules and/or mRNA of the invention may be formulated with at least one acrylic polymer. Acrylic polymers include but are not limited to, acrylic acid, methacrylic acid, acrylic acid and methacrylic acid copolymers, methyl methacrylate copolymers, ethoxyethyl methacrylates, cyanoethyl methacrylate, amino alkyl methacrylate copolymer, poly(acrylic acid), poly(methacrylic acid), polycyanoacrylates and combinations thereof.

[0479] In one embodiment, the modified nucleic acid molecules and/or mRNA of the present invention may be formulated with at least one polymer and/or derivatives thereof described in International Publication Nos. WO2011115862, WO2012082574 and WO2012068187 and U.S. Pub. No. 20120283427, each of which are herein incorporated by reference in their entireties. In another embodiment, the modified nucleic acid molecules or mRNA of the present invention may be formulated with a polymer of formula Z as described in WO2011115862, herein incorporated by reference in its entirety. In yet another embodiment, the modified nucleic acid molecules or mRNA may be formulated with a polymer of formula Z, Z′ or Z″ as described in International Pub. Nos. WO2012082574 or WO2012068187, each of which are herein incorporated by reference in their entireties. The polymers formulated with the modified nucleic acids and/or modified mRNA of the present invention may be synthesized by the methods described in International Pub. Nos. WO2012082574 or WO2012068187, each of which are herein incorporated by reference in their entireties.

[0480] Formulations of modified nucleic acid molecules and/or mRNA of the invention may include at least one amine-containing polymer such as, but not limited to polylysine, polyethylene imine, poly(amidoamine) dendrimers or combinations thereof

[0481] For example, the modified nucleic acid molecules and/or mRNA of the invention may be formulated in a pharmaceutical compound including a poly(alkylene imine), a biodegradable cationic lipopolymer, a biodegradable block copolymer, a biodegradable polymer, or a biodegradable random copolymer, a biodegradable polyester block copolymer, a biodegradable polyester polymer, a biodegradable polyester random copolymer, a linear biodegradable copolymer, PAGA, a biodegradable cross-linked cationic multi-block copolymer or combinations thereof. The biodegradable cationic lipopolymer may be made by methods known in the art and/or described in U.S. Pat. No. 6,696,038, U.S. App. Nos. 20030073619 and 20040142474 each of which is herein incorporated by reference in their entireties. The poly(alkylene imine) may be made using methods known in the art and/or as described in U.S. Pub. No. 20100004315, herein incorporated by reference in its entirety. The biodegradabale polymer, biodegradable block copolymer, the biodegradable random copolymer, biodegradable polyester block copolymer, biodegradable polyester polymer, or biodegradable polyester random copolymer may be made using methods known in the art and/or as described in U.S. Pat. Nos. 6,517,869 and 6,267,987, the contents of which are each incorporated herein by reference in their entirety. The linear biodegradable copolymer may be made using methods known in the art and/or as described in U.S. Pat. No. 6,652,886. The PAGA polymer may be made using methods known in the art and/or as described in U.S. Pat. No. 6,217,912 herein incorporated by reference in its entirety. The PAGA polymer may be copolymerized to form a copolymer or block copolymer with polymers such as but not limited to, poly-L-lysine, polyargine, polyornithine, histones, avidin, protamines, polylactides and poly(lactide-co-glycolides). The biodegradable cross-linked cationic multi-block copolymers may be made my methods known in the art and/or as described in U.S. Pat. No. 8,057,821 or U.S. Pub. No. 2012009145 each of which are herein incorporated by reference in their entireties. For example, the multi-block copolymers may be synthesized using linear polyethyleneimine (LPEI) blocks which have distinct patterns as compared to branched polyethyleneimines. Further, the composition or pharmaceutical composition may be made by the methods known in the art, described herein, or as described in U.S. Pub. No. 20100004315 or U.S. Pat. Nos. 6,267,987 and 6,217,912 each of which are herein incorporated by reference in their entireties.

[0482] The modified nucleic acid molecules and mRNA of the invention may be formulated with at least one degradable polyester which may contain polycationic side chains. Degradeable polyesters include, but are not limited to, poly(serine ester), poly(L-lactide-co-L-lysine), poly(4-hydroxy-L-proline ester), and combinations thereof. In another embodiment, the degradable polyesters may include a PEG conjugation to form a PEGylated polymer.

[0483] The modified nucleic acid molecules and mRNA of the invention may be formulated with at least one crosslinkable polyester. Crosslinkable polyesters include those known in the art and described in US Pub. No. 20120269761, herein incorporated by reference in its entirety.

[0484] In one embodiment, the polymers described herein may be conjugated to a lipid-terminating PEG. As a non-limiting example, PLGA may be conjugated to a lipid-terminating PEG forming PLGA-DSPE-PEG. As another non-limiting example, PEG conjugates for use with the present invention are described in International Publication No. WO2008103276, herein incorporated by reference in its entirety. The polymers may be conjugated using a ligand conjugate such as, but not limited to, the conjugates described in U.S. Pat. No. 8,273,363, herein incorporated by reference in its entirety.

[0485] In one embodiment, the modified nucleic acid molecules and/or mRNA described herein may be conjugated with another compound. Non-limiting examples of conjugates are described in U.S. Pat. Nos. 7,964,578 and 7,833,992, each of which are herein incorporated by reference in their entireties. In another embodiment, modified RNA of the present invention may be conjugated with conjugates of formula I-122 as described in U.S. Pat. Nos. 7,964,578 and 7,833,992, each of which are herein incorporated by reference in their entireties. The modified RNA described herein may be conjugated with a metal such as, but not limited to, gold. (See e.g., Giljohann et al. Journ. Amer. Chem. Soc. 2009 131(6): 2072-2073; herein incorporated by reference in its entirety). In another embodiment, the modified nucleic acid molecules and/or mRNA described herein may be conjugated and/or encapsulated in gold-nanoparticles. (International Pub. No. WO201216269 and U.S. Pub. No. 20120302940; each of which is herein incorporated by reference in its entirety).

[0486] As described in U.S. Pub. No. 20100004313, herein incorporated by reference in its entirety, a gene delivery composition may include a nucleotide sequence and a poloxamer. For example, the modified nucleic acid and mRNA of the present invention may be used in a gene delivery composition with the poloxamer described in U.S. Pub. No. 20100004313.

[0487] In one embodiment, the polymer formulation of the present invention may be stabilized by contacting the polymer formulation, which may include a cationic carrier, with a cationic lipopolymer which may be covalently linked to cholesterol and polyethylene glycol groups. The polymer formulation may be contacted with a cationic lipopolymer using the methods described in U.S. Pub. No. 20090042829 herein incorporated by reference in its entirety. The cationic carrier may include, but is not limited to, polyethylenimine, poly(trimethylenimine), poly(tetramethylenimine), polypropylenimine, aminoglycoside-polyamine, dideoxy-diamino-b-cyclodextrin, spermine, spermidine, poly(2-dimethylamino)ethyl methacrylate, poly(lysine), poly(histidine), poly(arginine), cationized gelatin, dendrimers, chitosan, 1,2-Dioleoyl-3-Trimethylammonium-Propane (DOTAP), N-[1-(2,3-dioleoyloxy)propyl]-N,N,N-trimethylammonium chloride (DOTMA), 1-[2-(oleoyloxy)ethyl]-2-oleyl-3-(2-hydroxyethyl)imidazolinium chloride (DOTIM), 2,3-dioleyloxy-N-[2(sperminecarboxamido)ethyl]-N,N-dimethyl-1-propanaminium trifluoroacetate (DOSPA), 3B—[N—(N′,N′-Dimethylaminoethane)-carbamoyl]Cholesterol Hydrochloride (DC-Cholesterol HCl) diheptadecylamidoglycyl spermidine (DOGS), N,N-distearyl-N,N-dimethylammonium bromide (DDAB), N-(1,2-dimyristyloxyprop-3-yl)-N,N-dimethyl-N-hydroxyethyl ammonium bromide (DMRIE), N,N-dioleyl-N,N-dimethylammonium chloride DODAC) and combinations thereof.

[0488] The modified nucleic acid molecules and/or mRNA of the invention may be formulated in a polyplex of one or more polymers (U.S. Pub. No. 20120237565 and 20120270927; each of which is herein incorporated by reference in its entirety). In one embodiment, the polyplex comprises two or more cationic polymers. The catioinic polymer may comprise a poly(ethylene imine) (PEI) such as linear PEI.

[0489] The modified nucleic acid molecules and mRNA of the invention can also be formulated as a nanoparticle using a combination of polymers, lipids, and/or other biodegradable agents, such as, but not limited to, calcium phosphate. Components may be combined in a core-shell, hybrid, and/or layer-by-layer architecture, to allow for fine-tuning of the nanoparticle so to delivery of the modified nucleic acid molecule and mRNA may be enhanced (Wang et al., Nat. Mater. 2006 5:791-796; Fuller et al., Biomaterials. 2008 29:1526-1532; DeKoker et al., Adv Drug Deliv Rev. 2011 63:748-761; Endres et al., Biomaterials. 2011 32:7721-7731; Su et al., Mol. Pharm. 2011 Jun. 6; 8(3):774-87; each of which is herein incorporated by reference in its entirety). As a non-limiting example, the nanoparticle may comprise a plurality of polymers such as, but not limited to hydrophilic-hydrophobic polymers (e.g., PEG-PLGA), hydrophobic polymers (e.g., PEG) and/or hydrophilic polymers (International Pub. No. WO20120225129; herein incorporated by reference in its entirety).

[0490] Biodegradable calcium phosphate nanoparticles in combination with lipids and/or polymers have been shown to deliver modified nucleic acid molecules and mRNA in vivo. In one embodiment, a lipid coated calcium phosphate nanoparticle, which may also contain a targeting ligand such as anisamide, may be used to deliver the modified nucleic acid molecule and mRNA of the present invention. For example, to effectively deliver siRNA in a mouse metastatic lung model a lipid coated calcium phosphate nanoparticle was used (Li et al., J Contr Rel. 2010 142: 416-421; Li et al., J Contr Rel. 2012 158:108-114; Yang et al., Mol. Ther. 2012 20:609-615; herein incorporated by reference in its entirety). This delivery system combines both a targeted nanoparticle and a component to enhance the endosomal escape, calcium phosphate, in order to improve delivery of the siRNA.

[0491] In one embodiment, calcium phosphate with a PEG-polyanion block copolymer may be used to deliver modified nucleic acid molecules and mRNA (Kazikawa et al., J Contr Rel. 2004 97:345-356; Kazikawa et al., J Contr Rel. 2006 111:368-370; herein incorporated by reference in its entirety).

[0492] In one embodiment, a PEG-charge-conversional polymer (Pitella et al., Biomaterials. 2011 32:3106-3114) may be used to form a nanoparticle to deliver the modified nucleic acid molecules and mRNA of the present invention. The PEG-charge-conversional polymer may improve upon the PEG-polyanion block copolymers by being cleaved into a polycation at acidic pH, thus enhancing endosomal escape.

[0493] The use of core-shell nanoparticles has additionally focused on a high-throughput approach to synthesize cationic cross-linked nanogel cores and various shells (Siegwart et al., Proc Natl Acad Sci USA. 2011 108:12996-13001). The complexation, delivery, and internalization of the polymeric nanoparticles can be precisely controlled by altering the chemical composition in both the core and shell components of the nanoparticle. For example, the core-shell nanoparticles may efficiently deliver siRNA to mouse hepatocytes after they covalently attach cholesterol to the nanoparticle.

[0494] In one embodiment, a hollow lipid core comprising a middle PLGA layer and an outer neutral lipid layer containing PEG may be used to delivery of the modified nucleic acid molecules and mRNA of the present invention. As a non-limiting example, in mice bearing a luciferease-expressing tumor, it was determined that the lipid-polymer-lipid hybrid nanoparticle significantly suppressed luciferase expression, as compared to a conventional lipoplex (Shi et al, Angew Chem Int Ed. 2011 50:7027-7031; herein incorporated by reference in its entirety).

[0495] In one embodiment, the lipid nanoparticles may comprise a core of the modified nucleic acid molecules disclosed herein and a polymer shell. The polymer shell may be any of the polymers described herein and are known in the art. In an additional embodiment, the polymer shell may be used to protect the modified nucleic acids in the core.

[0496] Core-shell nanoparticles for use with the modified nucleic acid molecules of the present invention are described and may be formed by the methods described in U.S. Pat. No. 8,313,777 herein incorporated by reference in its entirety.

[0497] In one embodiment, the core-shell nanoparticles may comprise a core of the modified nucleic acid molecules disclosed herein and a polymer shell. The polymer shell may be any of the polymers described herein and are known in the art. In an additional embodiment, the polymer shell may be used to protect the modified nucleic acid molecules in the core.

### Peptides and Proteins

[0498] The modified nucleic acid molecules and mRNA of the invention can be formulated with peptides and/or proteins in order to increase transfection of cells by the modified nucleic acid molecules or mRNA. In one embodiment, peptides such as, but not limited to, cell penetrating peptides and proteins and peptides that enable intracellular delivery may be used to deliver pharmaceutical formulations. A non-limiting example of a cell penetrating peptide which may be used with the pharmaceutical formulations of the present invention include a cell-penetrating peptide sequence attached to polycations that facilitates delivery to the intracellular space, e.g., HIV-derived TAT peptide, penetratins, transportans, or hCT derived cell-penetrating peptides (see, e.g., Caron et al., Mol. Ther. 3(3):310-8 (2001); Langel, Cell-Penetrating Peptides: Processes and Applications (CRC Press, Boca Raton Fla., 2002); El-Andaloussi et al., Curr. Pharm. Des. 11(28):3597-611 (2003); and Deshayes et al., Cell. Mol. Life. Sci. 62 (16):1839-49 (2005), all of which are incorporated herein by reference). The compositions can also be formulated to include a cell penetrating agent, e.g., liposomes, which enhance delivery of the compositions to the intracellular space. Modified nucleic acid molecules and mRNA of the invention may be complexed to peptides and/or proteins such as, but not limited to, peptides and/or proteins from Aileron Therapeutics (Cambridge, Mass.) and Permeon Biologics (Cambridge, Mass.) in order to enable intracellular delivery (Cronican et al., ACS Chem. Biol. 2010 5:747-752; McNaughton et al., Proc. Natl. Acad. Sci. USA 2009 106:6111-6116; Sawyer, Chem Biol Drug Des. 2009 73:3-6; Verdine and Hilinski, Methods Enzymol. 2012; 503:3-33; all of which are herein incorporated by reference in its entirety).

[0499] In one embodiment, the cell-penetrating polypeptide may comprise a first domain and a second domain. The first domain may comprise a supercharged polypeptide. The second domain may comprise a protein-binding partner. As used herein, “protein-binding partner” includes, but are not limited to, antibodies and functional fragments thereof, scaffold proteins, or peptides. The cell-penetrating polypeptide may further comprise an intracellular binding partner for the protein-binding partner. The cell-penetrating polypeptide may be capable of being secreted from a cell where the modified nucleic acid molecules or mRNA may be introduced.

[0500] Formulations of the including peptides or proteins may be used to increase cell transfection by the modified nucleic acid molecule or mRNA, alter the biodistribution of the modified nucleic acid molecule or mRNA (e.g., by targeting specific tissues or cell types), and/or increase the translation of encoded protein. (See e.g., International Pub. No. WO2012110636; herein incorporated by reference in its entirety).

### Cells

[0501] The modified nucleic acid molecule and mRNA of the invention can be transfected ex vivo into cells, which are subsequently transplanted into a subject. As non-limiting examples, the pharmaceutical compositions may include red blood cells to deliver modified RNA to liver and myeloid cells, virosomes to deliver modified nucleic acid molecules and mRNA in virus-like particles (VLPs), and electroporated cells such as, but not limited to, from MAXCYTE® (Gaithersburg, Md.) and from ERYTECH® (Lyon, France) to deliver modified RNA. Examples of use of red blood cells, viral particles and electroporated cells to deliver payloads other than mRNA have been documented (Godfrin et al., Expert Opin Biol Ther. 2012 12:127-133; Fang et al., Expert Opin Biol Ther. 2012 12:385-389; Hu et al., Proc Natl Acad Sci USA. 2011 108:10980-10985; Lund et al., Pharm Res. 2010 27:400-420; Huckriede et al., J Liposome Res. 2007; 17:39-47; Cusi, Hum Vaccin. 2006 2:1-7; de Jonge et al., Gene Ther. 2006 13:400-411; all of which are herein incorporated by reference in its entirety). The modified nucleic acid molecules and mRNA may be delivered in synthetic VLPs synthesized by the methods described in International Pub No. WO2011085231 and US Pub No. 20110171248, each of which are herein incorporated by reference in their entireties.

[0502] Cell-based formulations of the modified nucleic acid molecules and mRNA of the invention may be used to ensure cell transfection (e.g., in the cellular carrier), alter the biodistribution of the modified nucleic acid molecule or mRNA (e.g., by targeting the cell carrier to specific tissues or cell types), and/or increase the translation of encoded protein.

Introduction into Cells

[0503] A variety of methods are known in the art and suitable for introduction of nucleic acid into a cell, including viral and non-viral mediated techniques. Examples of typical non-viral mediated techniques include, but are not limited to, electroporation, calcium phosphate mediated transfer, nucleofection, sonoporation, heat shock, magnetofection, liposome mediated transfer, microinjection, microprojectile mediated transfer (nanoparticles), cationic polymer mediated transfer (DEAE-dextran, polyethylenimine, polyethylene glycol (PEG) and the like) or cell fusion.

[0504] The technique of sonoporaiton, or cellular sonication, is the use of sound (e.g., ultrasonic frequencies) for modifying the permeability of the cell plasma membrane. Sonoporation methods are known to those in the art and are taught for example as it relates to bacteria in US Patent Publication 20100196983 and as it relates to other cell types in, for example, US Patent Publication 20100009424, each of which are incorporated herein by reference in their entirety.

[0505] Electroporation techniques are also well known in the art. In one embodiment, modified nucleic acid molecules or mRNA may be delivered by electroporation as described in Example 8.

### Hyaluronidase

[0506] The intramuscular or subcutaneous localized injection of modified nucleic acid molecules or mRNA of the invention can include hyaluronidase, which catalyzes the hydrolysis of hyaluronan. By catalyzing the hydrolysis of hyaluronan, a constituent of the interstitial barrier, hyaluronidase lowers the viscosity of hyaluronan, thereby increasing tissue permeability (Frost, Expert Opin. Drug Deliv. (2007) 4:427-440; herein incorporated by reference in its entirety). It is useful to speed their dispersion and systemic distribution of encoded proteins produced by transfected cells. Alternatively, the hyaluronidase can be used to increase the number of cells exposed to a modified nucleic acid molecule or mRNA of the invention administered intramuscularly or subcutaneously.

### Nanoparticle Mimics

[0507] The modified nucleic acid molecules and mRNA of the invention may be encapsulated within and/or absorbed to a nanoparticle mimic. A nanoparticle mimic can mimic the delivery function organisms or particles such as, but not limited to, pathogens, viruses, bacteria, fungus, parasites, prions and cells. As a non-limiting example the modified mRNA of the invention may be encapsulated in a non-viron particle which can mimic the delivery function of a virus (see International Pub. No. WO2012006376 herein incorporated by reference in its entirety).

### Nanotubes

[0508] The modified nucleic acid molecules or mRNA of the invention can be attached or otherwise bound to at least one nanotube such as, but not limited to, rosette nanotubes, rosette nanotubes having twin bases with a linker, carbon nanotubes and/or single-walled carbon nanotubes, The modified nucleic acid molecules or mRNA may be bound to the nanotubes through forces such as, but not limited to, steric, ionic, covalent and/or other forces.

[0509] In one embodiment, the nanotube can release one or more modified nucleic acid molecule or mRNA into cells. The size and/or the surface structure of at least one nanotube may be altered so as to govern the interaction of the nanotubes within the body and/or to attach or bind to the modified nucleic acid molecule or mRNA disclosed herein. In one embodiment, the building block and/or the functional groups attached to the building block of the at least one nanotube may be altered to adjust the dimensions and/or properties of the nanotube. As a non-limiting example, the length of the nanotubes may be altered to hinder the nanotubes from passing through the holes in the walls of normal blood vessels but still small enough to pass through the larger holes in the blood vessels of tumor tissue.

[0510] In one embodiment, at least one nanotube may also be coated with delivery enhancing compounds including polymers, such as, but not limited to, polyethylene glycol. In another embodiment, at least one nanotube and/or the modified mRNA may be mixed with pharmaceutically acceptable excipients and/or delivery vehicles.

[0511] In one embodiment, the modified mRNA are attached and/or otherwise bound to at least one rosette nanotube. The rosette nanotubes may be formed by a process known in the art and/or by the process described in International Publication No. WO2012094304, herein incorporated by reference in its entirety. At least one modified mRNA may be attached and/or otherwise bound to at least one rosette nanotube by a process as described in International Publication No. WO2012094304, herein incorporated by reference in its entirety, where rosette nanotubes or modules forming rosette nanotubes are mixed in aqueous media with at least one modified mRNA under conditions which may cause at least one modified mRNA to attach or otherwise bind to the rosette nanotubes.

[0512] In one embodiment, the modified nucleic acid molecule or mRNA may be attached to and/or otherwise bound to at least one carbon nanotube. As a non-limiting example, the modified nucleic acid molecule or mRNA may be bound to a linking agent and the linked agent may be bound to the carbon nanotube (See e.g., U.S. Pat. No. 8,246,995; herein incorporated by reference in its entirety). The carbon nanotube may be a single-walled nanotube (See e.g., U.S. Pat. No. 8,246,995; herein incorporated by reference in its entirety).

### Conjugates

[0513] The modified nucleic acids molecules and mRNA of the invention include conjugates, such as a modified nucleic acid molecule or mRNA covalently linked to a carrier or targeting group, or including two encoding regions that together produce a fusion protein (e.g., bearing a targeting group and therapeutic protein or peptide).

[0514] The conjugates of the invention include a naturally occurring substance, such as a protein (e.g., human serum albumin (HSA), low-density lipoprotein (LDL), high-density lipoprotein (HDL), or globulin); an carbohydrate (e.g., a dextran, pullulan, chitin, chitosan, inulin, cyclodextrin or hyaluronic acid); or a lipid. The ligand may also be a recombinant or synthetic molecule, such as a synthetic polymer, e.g., a synthetic polyamino acid, an oligonucleotide (e.g. an aptamer). Examples of polyamino acids include polyamino acid is a polylysine (PLL), poly L-aspartic acid, poly L-glutamic acid, styrene-maleic acid anhydride copolymer, poly(L-lactide-co-glycolied) copolymer, divinyl ether-maleic anhydride copolymer, N-(2-hydroxypropyl)methacrylamide copolymer (HMPA), polyethylene glycol (PEG), polyvinyl alcohol (PVA), polyurethane, poly(2-ethylacryllic acid), N-isopropylacrylamide polymers, or polyphosphazine. Example of polyamines include: polyethylenimine, polylysine (PLL), spermine, spermidine, polyamine, pseudopeptide-polyamine, peptidomimetic polyamine, dendrimer polyamine, arginine, amidine, protamine, cationic lipid, cationic porphyrin, quaternary salt of a polyamine, or an alpha helical peptide.

[0515] Representative U.S. patents that teach the preparation of polynucleotide conjugates, particularly to RNA, include, but are not limited to, U.S. Pat. Nos. 4,828,979; 4,948,882; 5,218,105; 5,525,465; 5,541,313; 5,545,730; 5,552,538; 5,578,717, 5,580,731; 5,591,584; 5,109,124; 5,118,802; 5,138,045; 5,414,077; 5,486,603; 5,512,439; 5,578,718; 5,608,046; 4,587,044; 4,605,735; 4,667,025; 4,762,779; 4,789,737; 4,824,941; 4,835,263; 4,876,335; 4,904,582; 4,958,013; 5,082,830; 5,112,963; 5,214,136; 5,082,830; 5,112,963; 5,214,136; 5,245,022; 5,254,469; 5,258,506; 5,262,536; 5,272,250; 5,292,873; 5,317,098; 5,371,241, 5,391,723; 5,416,203, 5,451,463; 5,510,475; 5,512,667; 5,514,785; 5,565,552; 5,567,810; 5,574,142; 5,585,481; 5,587,371; 5,595,726; 5,597,696; 5,599,923; 5,599,928 and 5,688,941; 6,294,664; 6,320,017; 6,576,752; 6,783,931; 6,900,297; 7,037,646; each of which is herein incorporated by reference in their entireties.

[0516] In one embodiment, the conjugate of the present invention may function as a carrier for the modified nucleic acid molecules and mRNA of the present invention. The conjugate may comprise a cationic polymer such as, but not limited to, polyamine, polylysine, polyalkylenimine, and polyethylenimine which may be grafted to with poly(ethylene glycol). As a non-limiting example, the conjugate may be similar to the polymeric conjugate and the method of synthesizing the polymeric conjugate described in U.S. Pat. No. 6,586,524 herein incorporated by reference in its entirety.

[0517] The conjugates can also include targeting groups, e.g., a cell or tissue targeting agent, e.g., a lectin, glycoprotein, lipid or protein, e.g., an antibody, that binds to a specified cell type such as a kidney cell. A targeting group can be a thyrotropin, melanotropin, lectin, glycoprotein, surfactant protein A, Mucin carbohydrate, multivalent lactose, multivalent galactose, N-acetyl-galactosamine, N-acetyl-gulucosamine multivalent mannose, multivalent fucose, glycosylated polyaminoacids, multivalent galactose, transferrin, bisphosphonate, polyglutamate, polyaspartate, a lipid, cholesterol, a steroid, bile acid, folate, vitamin B12, biotin, an RGD peptide, an RGD peptide mimetic or an aptamer.

[0518] Targeting groups can be proteins, e.g., glycoproteins, or peptides, e.g., molecules having a specific affinity for a co-ligand, or antibodies e.g., an antibody, that binds to a specified cell type such as a cancer cell, endothelial cell, or bone cell. Targeting groups may also include hormones and hormone receptors. They can also include non-peptidic species, such as lipids, lectins, carbohydrates, vitamins, cofactors, multivalent lactose, multivalent galactose, N-acetyl-galactosamine, N-acetyl-gulucosamine multivalent mannose, multivalent fucose, or aptamers. The ligand can be, for example, a lipopolysaccharide, or an activator of p38 MAP kinase.

[0519] The targeting group can be any ligand that is capable of targeting a specific receptor. Examples include, without limitation, folate, GalNAc, galactose, mannose, mannose-6P, apatamers, integrin receptor ligands, chemokine receptor ligands, transferrin, biotin, serotonin receptor ligands, PSMA, endothelin, GCPII, somatostatin, LDL, and HDL ligands. In particular embodiments, the targeting group is an aptamer. The aptamer can be unmodified or have any combination of modifications disclosed herein.

[0520] In one embodiment, pharmaceutical compositions of the present invention may include chemical modifications such as, but not limited to, modifications similar to locked nucleic acids.

[0521] Representative U.S. patents that teach the preparation of locked nucleic acid (LNA) such as those from Santaris, include, but are not limited to, the following: U.S. Pat. Nos. 6,268,490; 6,670,461; 6,794,499; 6,998,484; 7,053,207; 7,084,125; and 7,399,845, each of which is herein incorporated by reference in its entirety.

[0522] Representative U.S. patents that teach the preparation of PNA compounds include, but are not limited to, U.S. Pat. Nos. 5,539,082; 5,714,331; and 5,719,262, each of which is herein incorporated by reference. Further teaching of PNA compounds can be found, for example, in Nielsen et al., Science, 1991, 254, 1497-1500.

[0523] Some embodiments featured in the invention include modified nucleic acids or mRNA with phosphorothioate backbones and oligonucleosides with other modified backbones, and in particular —CH₂—NH—CH₂—, —CH₂—N(CH₃)—O—CH₂— [known as a methylene (methylimino) or MMI backbone], —CH₂—O—N(CH₃)—CH₂—, —CH₂—N(CH₃)—N(CH₃)—CH₂— and —N(CH₃)—CH₂—CH₂—[wherein the native phosphodiester backbone is represented as —O—P(O)₂—O—CH₂—] of the above-referenced U.S. Pat. No. 5,489,677, and the amide backbones of the above-referenced U.S. Pat. No. 5,602,240. In some embodiments, the polynucletotides featured herein have morpholino backbone structures of the above-referenced U.S. Pat. No. 5,034,506.

[0524] Modifications at the 2′ position may also aid in delivery. Preferably, modifications at the 2′ position are not located in a polypeptide-coding sequence, i.e., not in a translatable region. Modifications at the 2′ position may be located in a 5′ UTR, a 3′ UTR and/or a tailing region. Modifications at the 2′ position can include one of the following at the 2′ position: H (i.e., 2′-deoxy); F; O-, S-, or N-alkyl; O-, S-, or N-alkenyl; O-, S- or N-alkynyl; or O-alkyl-O-alkyl, wherein the alkyl, alkenyl and alkynyl may be substituted or unsubstituted C₁ to C₁₀ alkyl or C₂ to C₁₀ alkenyl and alkynyl. Exemplary suitable modifications include O[(CH₂)ₙO]ₘCH₃, O(CH₂)ₙOCH₃, O(CH₂)ₙNH₂, O(CH₂)ₙCH₃, O(CH₂)ₙONH₂, and O(CH₂)ₙON[(CH₂)ₙCH₃)]₂, where n and m are from 1 to about 10. In other embodiments, the modified nucleic acids or mRNA include one of the following at the 2′ position: C₁ to C₁₀ lower alkyl, substituted lower alkyl, alkaryl, aralkyl, O-alkaryl or O-aralkyl, SH, SCH₃, OCN, Cl, Br, CN, CF₃, OCF₃, SOCH₃, SO₂CH₃, ONO₂, NO₂, N₃, NH₂, heterocycloalkyl, heterocycloalkaryl, aminoalkylamino, polyalkylamino, substituted silyl, an RNA cleaving group, a reporter group, an intercalator, a group for improving the pharmacokinetic properties, or a group for improving the pharmacodynamic properties, and other substituents having similar properties. In some embodiments, the modification includes a 2′-methoxyethoxy (2′-O—CH₂CH₂OCH₃, also known as 2′-O-(2-methoxyethyl) or 2′-MOE) (Martin et al., Helv. Chim. Acta, 1995, 78:486-504) i.e., an alkoxy-alkoxy group. Another exemplary modification is 2′-dimethylaminooxyethoxy, i.e., a O(CH₂)₂ON(CH₃)₂ group, also known as 2′-DMAOE, as described in examples herein below, and 2′-dimethylaminoethoxyethoxy (also known in the art as 2′-O -dimethylaminoethoxyethyl or 2′-DMAEOE), i.e., 2′-O—CH₂—O—CH₂—N(CH₂)₂, also described in examples herein below. Other modifications include 2′-methoxy (2′-OCH₃), 2′-aminopropoxy (2′-OCH₂CH₂CH₂NH₂) and 2′-fluoro (2′-F). Similar modifications may also be made at other positions, particularly the 3′ position of the sugar on the 3′ terminal nucleotide or in 2′-5′ linked dsRNAs and the 5′ position of 5′ terminal nucleotide. Polynucleotides of the invention may also have sugar mimetics such as cyclobutyl moieties in place of the pentofuranosyl sugar. Representative U.S. patents that teach the preparation of such modified sugar structures include, but are not limited to, U.S. Pat. Nos. 4,981,957; 5,118,800; 5,319,080; 5,359,044; 5,393,878; 5,446,137; 5,466,786; 5,514,785; 5,519,134; 5,567,811; 5,576,427; 5,591,722; 5,597,909; 5,610,300; 5,627,053; 5,639,873; 5,646,265; 5,658,873; 5,670,633; and 5,700,920 and each of which is herein incorporated by reference.

[0525] In still other embodiments, the modified nucleic acid molecule or mRNA is covalently conjugated to a cell-penetrating polypeptide. The cell-penetrating peptide may also include a signal sequence. The conjugates of the invention can be designed to have increased stability; increased cell transfection; and/or altered the biodistribution (e.g., targeted to specific tissues or cell types).

### Self-Assembled Nanoparticles

### Nucleic Acid Self-Assembled Nanoparticles

[0526] Self-assembled nanoparticles have a well-defined size which may be precisely controlled as the nucleic acid strands may be easily reprogrammable. For example, the optimal particle size for a cancer-targeting nanodelivery carrier is 20-100 nm as a diameter greater than 20 nm avoids renal clearance and enhances delivery to certain tumors through enhanced permeability and retention effect. Using self-assembled nucleic acid nanoparticles a single uniform population in size and shape having a precisely controlled spatial orientation and density of cancer-targeting ligands for enhanced delivery. As a non-limiting example, oligonucleotide nanoparticles were prepared using programmable self-assembly of short DNA fragments and therapeutic siRNAs. These nanoparticles are molecularly identical with controllable particle size and target ligand location and density. The DNA fragments and siRNAs self-assembled into a one-step reaction to generate DNA/siRNA tetrahedral nanoparticles for targeted in vivo delivery. (Lee et al., Nature Nanotechnology 2012 7:389-393; herein incorporated by reference in its entirety).

[0527] In one embodiment, the modified nucleic acid molecules and mRNA disclosed herein may be formulated as self-assembled nanoparticles. As a non-limiting example, nucleic acids may be used to make nanoparticles which may be used in a delivery system for the modified nucleic acid molecules and/or mRNA of the present invention (See e.g., International Pub. No. WO2012125987; herein incorporated by reference in its entirety).

[0528] In one embodiment, the nucleic acid self-assembled nanoparticles may comprise a core of the modified nucleic acid molecules or mRNA disclosed herein and a polymer shell. The polymer shell may be any of the polymers described herein and are known in the art. In an additional embodiment, the polymer shell may be used to protect the modified nucleic acid molecules and mRNA in the core.

### Polymer-Based Self-Assembled Nanoparticles

[0529] Polymers may be used to form sheets which self-assembled into nanoparticles. These nanoparticles may be used to deliver the modified nucleic acids and mRNA of the present invention. In one embodiment, these self-assembled nanoparticles may be microsponges formed of long polymers of RNA hairpins which form into crystalline ‘pleated’ sheets before self-assembling into microsponges. These microsponges are densely-packed sponge like microparticles which may function as an efficient carrier and may be able to deliver cargo to a cell. The microsponges may be from 1 um to 300 nm in diameter. The microsponges may be complexed with other agents known in the art to form larger microsponges. As a non-limiting example, the microsponge may be complexed with an agent to form an outer layer to promote cellular uptake such as polycation polyethyleneime (PEI). This complex can form a 250-nm diameter particle that can remain stable at high temperatures (150° C.) (Grabow and Jaegar, Nature Materials 2012, 11:269-269; herein incorporated by reference in its entirety). Additionally these microsponges may be able to exhibit an extraordinary degree of protection from degradation by ribonucleases.

[0530] In another embodiment, the polymer-based self-assembled nanoparticles such as, but not limited to, microsponges, may be fully programmable nanoparticles. The geometry, size and stoichiometry of the nanoparticle may be precisely controlled to create the optimal nanoparticle for delivery of cargo such as, but not limited to, modified nucleic acid molecules and mRNA.

[0531] In one embodiment, the polymer based nanoparticles may comprise a core of the modified nucleic acid molecules and mRNA disclosed herein and a polymer shell. The polymer shell may be any of the polymers described herein and are known in the art. In an additional embodiment, the polymer shell may be used to protect the modified nucleic acid molecules and mRNA in the core.

### Inorganic Nanoparticles

[0532] The modified nucleic acid molecules or mRNAs of the present invention may be formulated in inorganic nanoparticles (U.S. Pat. No. 8,257,745, herein incorporated by reference in its entirety). The inorganic nanoparticles may include, but are not limited to, clay substances that are water swellable. As a non-limiting example, the inorganic nanoparticle may include synthetic smectite clays which are made from simple silicates (See e.g., U.S. Pat. Nos. 5,585,108 and 8,257,745 each of which are herein incorporated by reference in their entirety).

[0533] In one embodiment, the inorganic nanoparticles may comprise a core of the modified nucleic acids disclosed herein and a polymer shell. The polymer shell may be any of the polymers described herein and are known in the art. In an additional embodiment, the polymer shell may be used to protect the modified nucleic acids in the core.

### Semi-Conductive and Metallic Nanoparticles

[0534] The modified nucleic acid molecules or mRNAs of the present invention may be formulated in water-dispersible nanoparticle comprising a semiconductive or metallic material (U.S. Pub. No. 20120228565; herein incorporated by reference in its entirety) or formed in a magnetic nanoparticle (U.S. Pub. No. 20120265001 and 20120283503; each of which is herein incorporated by reference in its entirety). The water-dispersible nanoparticles may be hydrophobic nanoparticles or hydrophilic nanoparticles.

[0535] In one embodiment, the semi-conductive and/or metallic nanoparticles may comprise a core of the modified nucleic acids disclosed herein and a polymer shell. The polymer shell may be any of the polymers described herein and are known in the art. In an additional embodiment, the polymer shell may be used to protect the modified nucleic acids in the core.

### Gels and Hydrogels

[0536] In one embodiment, the modified mRNA disclosed herein may be encapsulated into any hydrogel known in the art which may form a gel when injected into a subject. Hydrogels are a network of polymer chains that are hydrophilic, and are sometimes found as a colloidal gel in which water is the dispersion medium. Hydrogels are highly absorbent (they can contain over 99% water) natural or synthetic polymers. Hydrogels also possess a degree of flexibility very similar to natural tissue, due to their significant water content. The hydrogel described herein may used to encapsulate lipid nanoparticles which are biocompatible, biodegradable and/or porous.

[0537] As a non-limiting example, the hydrogel may be an aptamer-functionalized hydrogel. The aptamer-functionalized hydrogel may be programmed to release one or more modified nucleic acid molecules and/or mRNA using nucleic acid hybridization. (Battig et al., J. Am. Chem. Society. 2012 134:12410-12413; herein incorporated by reference in its entirety).

[0538] As another non-limiting example, the hydrogel may be a shaped as an inverted opal. The opal hydrogels exhibit higher swelling ratios and the swelling kinetics is an order of magnitude faster as well. Methods of producing opal hydrogels and description of opal hydrogels are described in International Pub. No. WO2012148684, herein incorporated by reference in its entirety.

[0539] In yet another non-limiting example, the hydrogel may be an antibacterial hydrogel. The antibacterial hydrogel may comprise a pharmaceutical acceptable salt or organic material such as, but not limited to pharmaceutical grade and/or medical grade silver salt and aloe vera gel or extract. (International Pub. No. WO2012151438, herein incorporated by reference in its entirety).

[0540] In one embodiment, the modified mRNA may be encapsulated in a lipid nanoparticle and then the lipid nanoparticle may be encapsulated into a hyrdogel.

[0541] In one embodiment, the modified mRNA disclosed herein may be encapsulated into any gel known in the art. As a non-limiting example the gel may be a fluorouracil injectable gel or a fluorouracil injectable gel containing a chemical compound and/or drug known in the art. As another example, the modified mRNA may be encapsulated in a fluorouracil gel containing epinephrine (See e.g., Smith et al. Cancer Chemotherapty and Pharmacology, 1999 44(4):267-274; herein incorporated by reference in its entirety).

[0542] In one embodiment, the modified nucleic acid molecules and/or mRNA disclosed herein may be encapsulated into a fibrin gel, fibrin hydrogel or fibrin glue. In another embodiment, the modified nucleic acid molecules and/or mRNA may be formulated in a lipid nanoparticle or a rapidly eliminated lipid nanoparticle prior to being encapsulated into a fibrin gel, fibrin hydrogel or a fibrin glue. In yet another embodiment, the modified nucleic acid molecules and/or mRNA may be formulated as a lipoplex prior to being encapsulated into a fibrin gel, hydrogel or a fibrin glue. Fibrin gels, hydrogels and glues comprise two components, a fibrinogen solution and a thrombin solution which is rich in calcium (See e.g., Spicer and Mikos, Journal of Controlled Release 2010. 148: 49-55; Kidd et al. Journal of Controlled Release 2012. 157:80-85; each of which is herein incorporated by reference in its entirety). The concentration of the components of the fibrin gel, hydrogel and/or glue can be altered to change the characteristics, the network mesh size, and/or the degradation characteristics of the gel, hydrogel and/or glue such as, but not limited to changing the release characteristics of the fibrin gel, hydrogel and/or glue. (See e.g., Spicer and Mikos, Journal of Controlled Release 2010. 148: 49-55; Kidd et al. Journal of Controlled Release 2012. 157:80-85; Catelas et al. Tissue Engineering 2008. 14:119-128; each of which is herein incorporated by reference in its entirety). This feature may be advantageous when used to deliver the modified mRNA disclosed herein. (See e.g., Kidd et al. Journal of Controlled Release 2012. 157:80-85; Catelas et al. Tissue Engineering 2008. 14:119-128; each of which is herein incorporated by reference in its entirety).

### Cations and Anions

[0543] Formulations of modified nucleic acid molecules disclosed herein may include cations or anions. In one embodiment, the formulations include metal cations such as, but not limited to, Zn2+, Ca2+, Cu2+, Mg+ and combinations thereof. As a non-limiting example, formulations may include polymers and a modified mRNA complexed with a metal cation (See e.g., U.S. Pat. Nos. 6,265,389 and 6,555,525, each of which is herein incorporated by reference in its entirety).

### Molded Nanoparticles and Microparticles

[0544] The modified nucleic acid molecules and/or mRNA disclosed herein may be formulated in nanoparticles and/or microparticles. These nanoparticles and/or microparticles may be molded into any size shape and chemistry. As an example, the nanoparticles and/or microparticles may be made using the PRINT® technology by LIQUIDA TECHNOLOGIES® (Morrisville, N.C.) (See e.g., International Pub. No. WO2007024323; herein incorporated by reference in its entirety).

[0545] In one embodiment, the molded nanoparticles may comprise a core of the modified nucleic acid molecules and/or mRNA disclosed herein and a polymer shell. The polymer shell may be any of the polymers described herein and are known in the art. In an additional embodiment, the polymer shell may be used to protect the modified nucleic acid molecules and/or mRNA in the core.

### NanoJackets and NanoLiposomes

[0546] The modified nucleic acid molecules and/or mRNA disclosed herein may be formulated in NanoJackets and NanoLiposomes by Keystone Nano (State College, Pa.). NanoJackets are made of compounds that are naturally found in the body including calcium, phosphate and may also include a small amount of silicates. Nanojackets may range in size from 5 to 50 nm and may be used to deliver hydrophilic and hydrophobic compounds such as, but not limited to, modified nucleic acid molecules and/or mRNA.

[0547] NanoLiposomes are made of lipids such as, but not limited to, lipids which naturally occur in the body. NanoLiposomes may range in size from 60-80 nm and may be used to deliver hydrophilic and hydrophobic compounds such as, but not limited to, modified nucleic acid molecules and/or mRNA. In one aspect, the modified nucleic acids disclosed herein are formulated in a NanoLiposome such as, but not limited to, Ceramide NanoLiposomes.

### Excipients

[0548] Pharmaceutical formulations may additionally comprise a pharmaceutically acceptable excipient, which, as used herein, includes, but are not limited to, any and all solvents, dispersion media, diluents, or other liquid vehicles, dispersion or suspension aids, surface active agents, isotonic agents, thickening or emulsifying agents, preservatives, solid binders, lubricants and the like, as suited to the particular dosage form desired. Various excipients for formulating pharmaceutical compositions and techniques for preparing the composition are known in the art (see Remington: The Science and Practice of Pharmacy, 21^{st} Edition, A. R. Gennaro, Lippincott, Williams & Wilkins, Baltimore, Md., 2006; incorporated herein by reference in its entirety). The use of a conventional excipient medium may be contemplated within the scope of the present disclosure, except insofar as any conventional excipient medium may be incompatible with a substance or its derivatives, such as by producing any undesirable biological effect or otherwise interacting in a deleterious manner with any other component(s) of the pharmaceutical composition.

[0549] In some embodiments, a pharmaceutically acceptable excipient may be at least 95%, at least 96%, at least 97%, at least 98%, at least 99%, or 100% pure. In some embodiments, an excipient may be approved for use for humans and for veterinary use. In some embodiments, an excipient may be approved by United States Food and Drug Administration. In some embodiments, an excipient may be of pharmaceutical grade. In some embodiments, an excipient may meet the standards of the United States Pharmacopoeia (USP), the European Pharmacopoeia (EP), the British Pharmacopoeia, and/or the International Pharmacopoeia.

[0550] Pharmaceutically acceptable excipients used in the manufacture of pharmaceutical compositions include, but are not limited to, inert diluents, dispersing and/or granulating agents, surface active agents and/or emulsifiers, disintegrating agents, binding agents, preservatives, buffering agents, lubricating agents, and/or oils. Such excipients may optionally be included in pharmaceutical formulations. The composition may also include excipients such as cocoa butter and suppository waxes, coloring agents, coating agents, sweetening, flavoring, and/or perfuming agents.

[0551] Exemplary diluents include, but are not limited to, calcium carbonate, sodium carbonate, calcium phosphate, dicalcium phosphate, calcium sulfate, calcium hydrogen phosphate, sodium phosphate lactose, sucrose, cellulose, microcrystalline cellulose, kaolin, mannitol, sorbitol, inositol, sodium chloride, dry starch, cornstarch, powdered sugar, etc., and/or combinations thereof

[0552] Exemplary granulating and/or dispersing agents include, but are not limited to, potato starch, corn starch, tapioca starch, sodium starch glycolate, clays, alginic acid, guar gum, citrus pulp, agar, bentonite, cellulose and wood products, natural sponge, cation-exchange resins, calcium carbonate, silicates, sodium carbonate, cross-linked poly(vinyl-pyrrolidone) (crospovidone), sodium carboxymethyl starch (sodium starch glycolate), carboxymethyl cellulose, cross-linked sodium carboxymethyl cellulose (croscarmellose), methylcellulose, pregelatinized starch (starch 1500), microcrystalline starch, water insoluble starch, calcium carboxymethyl cellulose, magnesium aluminum silicate (VEEGUM®), sodium lauryl sulfate, quaternary ammonium compounds, etc., and/or combinations thereof.

[0553] Exemplary surface active agents and/or emulsifiers include, but are not limited to, natural emulsifiers (e.g. acacia, agar, alginic acid, sodium alginate, tragacanth, chondrux, cholesterol, xanthan, pectin, gelatin, egg yolk, casein, wool fat, cholesterol, wax, and lecithin), colloidal clays (e.g. bentonite [aluminum silicate] and VEEGUM® [magnesium aluminum silicate]), long chain amino acid derivatives, high molecular weight alcohols (e.g. stearyl alcohol, cetyl alcohol, oleyl alcohol, triacetin monostearate, ethylene glycol distearate, glyceryl monostearate, and propylene glycol monostearate, polyvinyl alcohol), carbomers (e.g. carboxy polymethylene, polyacrylic acid, acrylic acid polymer, and carboxyvinyl polymer), carrageenan, cellulosic derivatives (e.g. carboxymethylcellulose sodium, powdered cellulose, hydroxymethyl cellulose, hydroxypropyl cellulose, hydroxypropyl methylcellulose, methylcellulose), sorbitan fatty acid esters (e.g. polyoxyethylene sorbitan monolaurate [TWEEN®20], polyoxyethylene sorbitan [TWEEN 60], polyoxyethylene sorbitan monooleate [TWEEN®80], sorbitan monopalmitate [SPAN®40], sorbitan monostearate [SPAN®60], sorbitan tristearate [SPAN®65], glyceryl monooleate, sorbitan monooleate [SPAN®80]), polyoxyethylene esters (e.g. polyoxyethylene monostearate [MYRJ®45], polyoxyethylene hydrogenated castor oil, polyethoxylated castor oil, polyoxymethylene stearate, and) SOLUTOL®, sucrose fatty acid esters, polyethylene glycol fatty acid esters (e.g. CREMOPHOR®), polyoxyethylene ethers, (e.g. polyoxyethylene lauryl ether [BRIJ® 30]), poly(vinyl-pyrrolidone), diethylene glycol monolaurate, triethanolamine oleate, sodium oleate, potassium oleate, ethyl oleate, oleic acid, ethyl laurate, sodium lauryl sulfate, PLUORINC®F 68, POLOXAMER®188, cetrimonium bromide, cetylpyridinium chloride, benzalkonium chloride, docusate sodium, etc. and/or combinations thereof.

[0554] Exemplary binding agents include, but are not limited to, starch (e.g. cornstarch and starch paste); gelatin; sugars (e.g. sucrose, glucose, dextrose, dextrin, molasses, lactose, lactitol, mannitol,); natural and synthetic gums (e.g. acacia, sodium alginate, extract of Irish moss, panwar gum, ghatti gum, mucilage of isapol husks, carboxymethylcellulose, methylcellulose, ethylcellulose, hydroxyethylcellulose, hydroxypropyl cellulose, hydroxypropyl methylcellulose, microcrystalline cellulose, cellulose acetate, poly(vinyl-pyrrolidone), magnesium aluminum silicate (VEEGUM®), and larch arabogalactan); alginates; polyethylene oxide; polyethylene glycol; inorganic calcium salts; silicic acid; polymethacrylates; waxes; water; alcohol; etc.; and combinations thereof

[0555] Exemplary preservatives may include, but are not limited to, antioxidants, chelating agents, antimicrobial preservatives, antifungal preservatives, alcohol preservatives, acidic preservatives, and/or other preservatives. Exemplary antioxidants include, but are not limited to, alpha tocopherol, ascorbic acid, acorbyl palmitate, butylated hydroxyanisole, butylated hydroxytoluene, monothioglycerol, potassium metabisulfite, propionic acid, propyl gallate, sodium ascorbate, sodium bisulfite, sodium metabisulfite, and/or sodium sulfite. Exemplary chelating agents include ethylenediaminetetraacetic acid (EDTA), citric acid monohydrate, disodium edetate, dipotassium edetate, edetic acid, fumaric acid, malic acid, phosphoric acid, sodium edetate, tartaric acid, and/or trisodium edetate. Exemplary antimicrobial preservatives include, but are not limited to, benzalkonium chloride, benzethonium chloride, benzyl alcohol, bronopol, cetrimide, cetylpyridinium chloride, chlorhexidine, chlorobutanol, chlorocresol, chloroxylenol, cresol, ethyl alcohol, glycerin, hexetidine, imidurea, phenol, phenoxyethanol, phenylethyl alcohol, phenylmercuric nitrate, propylene glycol, and/or thimerosal. Exemplary antifungal preservatives include, but are not limited to, butyl paraben, methyl paraben, ethyl paraben, propyl paraben, benzoic acid, hydroxybenzoic acid, potassium benzoate, potassium sorbate, sodium benzoate, sodium propionate, and/or sorbic acid. Exemplary alcohol preservatives include, but are not limited to, ethanol, polyethylene glycol, phenol, phenolic compounds, bisphenol, chlorobutanol, hydroxybenzoate, and/or phenylethyl alcohol. Exemplary acidic preservatives include, but are not limited to, vitamin A, vitamin C, vitamin E, beta-carotene, citric acid, acetic acid, dehydroacetic acid, ascorbic acid, sorbic acid, and/or phytic acid. Other preservatives include, but are not limited to, tocopherol, tocopherol acetate, deteroxime mesylate, cetrimide, butylated hydroxyanisol (BHA), butylated hydroxytoluened (BHT), ethylenediamine, sodium lauryl sulfate (SLS), sodium lauryl ether sulfate (SLES), sodium bisulfite, sodium metabisulfite, potassium sulfite, potassium metabisulfite, GLYDANT PLUS®, PHENONIP®, methylparaben, GERMALL®115, GERMABEN®II, NEOLONE™, KATHON™, and/or EUXYL®.

[0556] Exemplary buffering agents include, but are not limited to, citrate buffer solutions, acetate buffer solutions, phosphate buffer solutions, ammonium chloride, calcium carbonate, calcium chloride, calcium citrate, calcium glubionate, calcium gluceptate, calcium gluconate, d-gluconic acid, calcium glycerophosphate, calcium lactate, propanoic acid, calcium levulinate, pentanoic acid, dibasic calcium phosphate, phosphoric acid, tribasic calcium phosphate, calcium hydroxide phosphate, potassium acetate, potassium chloride, potassium gluconate, potassium mixtures, dibasic potassium phosphate, monobasic potassium phosphate, potassium phosphate mixtures, sodium acetate, sodium bicarbonate, sodium chloride, sodium citrate, sodium lactate, dibasic sodium phosphate, monobasic sodium phosphate, sodium phosphate mixtures, tromethamine, magnesium hydroxide, aluminum hydroxide, alginic acid, pyrogen-free water, isotonic saline, Ringer's solution, ethyl alcohol, etc., and/or combinations thereof

[0557] Exemplary lubricating agents include, but are not limited to, magnesium stearate, calcium stearate, stearic acid, silica, talc, malt, glyceryl behanate, hydrogenated vegetable oils, polyethylene glycol, sodium benzoate, sodium acetate, sodium chloride, leucine, magnesium lauryl sulfate, sodium lauryl sulfate, etc., and combinations thereof

[0558] Exemplary oils include, but are not limited to, almond, apricot kernel, avocado, babassu, bergamot, black current seed, borage, cade, camomile, canola, caraway, carnauba, castor, cinnamon, cocoa butter, coconut, cod liver, coffee, corn, cotton seed, emu, eucalyptus, evening primrose, fish, flaxseed, geraniol, gourd, grape seed, hazel nut, hyssop, isopropyl myristate, jojoba, kukui nut, lavandin, lavender, lemon, litsea cubeba, macademia nut, mallow, mango seed, meadowfoam seed, mink, nutmeg, olive, orange, orange roughy, palm, palm kernel, peach kernel, peanut, poppy seed, pumpkin seed, rapeseed, rice bran, rosemary, safflower, sandalwood, sasquana, savoury, sea buckthorn, sesame, shea butter, silicone, soybean, sunflower, tea tree, thistle, tsubaki, vetiver, walnut, and wheat germ oils. Exemplary oils include, but are not limited to, butyl stearate, caprylic triglyceride, capric triglyceride, cyclomethicone, diethyl sebacate, dimethicone 360, isopropyl myristate, mineral oil, octyldodecanol, oleyl alcohol, silicone oil, and/or combinations thereof

[0559] Excipients such as cocoa butter and suppository waxes, coloring agents, coating agents, sweetening, flavoring, and/or perfuming agents can be present in the composition, according to the judgment of the formulator.

### Delivery

[0560] The present disclosure encompasses the delivery of modified nucleic acid molecules or mRNA for any of therapeutic, pharmaceutical, diagnostic or imaging by any appropriate route taking into consideration likely advances in the sciences of drug delivery. Delivery may be naked or formulated.

### Naked Delivery

[0561] The modified nucleic acid molecules or mRNA of the present invention may be delivered to a cell naked. As used herein in, “naked” refers to delivering modified nucleic acid molecules or mRNA free from agents which promote transfection. For example, the modified nucleic acid molecules or mRNA delivered to the cell may contain no modifications. The naked modified nucleic acid molecules or mRNA may be delivered to the cell using routes of administration known in the art and described herein.

### Formulated Delivery

[0562] The modified nucleic acid molecules or mRNA of the present invention may be formulated, using the methods described herein. The formulations may contain modified nucleic acid molecules or mRNA which may be modified and/or unmodified. The formulations may further include, but are not limited to, cell penetration agents, a pharmaceutically acceptable carrier, a delivery agent, a bioerodible or biocompatible polymer, a solvent, and a sustained-release delivery depot. The formulated modified nucleic acid molecules or mRNA may be delivered to the cell using routes of administration known in the art and described herein.

[0563] The compositions may also be formulated for direct delivery to an organ or tissue in any of several ways in the art including, but not limited to, direct soaking or bathing, via a catheter, by gels, powder, ointments, creams, gels, lotions, and/or drops, by using substrates such as fabric or biodegradable materials coated or impregnated with the compositions, and the like.

### Administration

[0564] The modified nucleic acid molecules or mRNA of the present invention may be administered by any route which results in a therapeutically effective outcome. These include, but are not limited to enteral, gastroenteral, epidural, oral, transdermal, epidural (peridural), intracerebral (into the cerebrum), intracerebroventricular (into the cerebral ventricles), epicutaneous (application onto the skin), intradermal, (into the skin itself), subcutaneous (under the skin), nasal administration (through the nose), intravenous (into a vein), intraarterial (into an artery), intramuscular (into a muscle), intracardiac (into the heart), intraosseous infusion (into the bone marrow), intrathecal (into the spinal canal), intraperitoneal, (infusion or injection into the peritoneum), intravesical infusion, intravitreal, (through the eye), intracavernous injection, (into the base of the penis), intravaginal administration, intrauterine, extra-amniotic administration, transdermal (diffusion through the intact skin for systemic distribution), transmucosal (diffusion through a mucous membrane), insufflation (snorting), sublingual, sublabial, enema, eye drops (onto the conjunctiva), or in ear drops. In specific embodiments, compositions may be administered in a way which allows them cross the blood-brain barrier, vascular barrier, or other epithelial barrier. Non-limiting routes of administration for the modified nucleic acids or mRNA of the present invention are described below.

### Parenteral and Injectible Administration

[0565] Liquid dosage forms for parenteral administration include, but are not limited to, pharmaceutically acceptable emulsions, microemulsions, solutions, suspensions, syrups, and/or elixirs. In addition to active ingredients, liquid dosage forms may comprise inert diluents commonly used in the art such as, for example, water or other solvents, solubilizing agents and emulsifiers such as ethyl alcohol, isopropyl alcohol, ethyl carbonate, ethyl acetate, benzyl alcohol, benzyl benzoate, propylene glycol, 1,3-butylene glycol, dimethylformamide, oils (in particular, cottonseed, groundnut, corn, germ, olive, castor, and sesame oils), glycerol, tetrahydrofurfuryl alcohol, polyethylene glycols and fatty acid esters of sorbitan, and mixtures thereof. Besides inert diluents, oral compositions can include adjuvants such as wetting agents, emulsifying and suspending agents, sweetening, flavoring, and/or perfuming agents. In certain embodiments for parenteral administration, compositions are mixed with solubilizing agents such as CREMOPHOR®, alcohols, oils, modified oils, glycols, polysorbates, cyclodextrins, polymers, and/or combinations thereof

[0566] Injectable preparations, for example, sterile injectable aqueous or oleaginous suspensions may be formulated according to the known art using suitable dispersing agents, wetting agents, and/or suspending agents. Sterile injectable preparations may be sterile injectable solutions, suspensions, and/or emulsions in nontoxic parenterally acceptable diluents and/or solvents, for example, as a solution in 1,3-butanediol. Among the acceptable vehicles and solvents that may be employed are water, Ringer's solution, U.S.P., and isotonic sodium chloride solution. Sterile, fixed oils are conventionally employed as a solvent or suspending medium. For this purpose any bland fixed oil can be employed including synthetic mono- or diglycerides. Fatty acids such as oleic acid can be used in the preparation of injectables.

[0567] Injectable formulations can be sterilized, for example, by filtration through a bacterial-retaining filter, and/or by incorporating sterilizing agents in the form of sterile solid compositions which can be dissolved or dispersed in sterile water or other sterile injectable medium prior to use.

[0568] In order to prolong the effect of an active ingredient, it is often desirable to slow the absorption of the active ingredient from subcutaneous or intramuscular injection. This may be accomplished by the use of a liquid suspension of crystalline or amorphous material with poor water solubility. The rate of absorption of the drug then depends upon its rate of dissolution which, in turn, may depend upon crystal size and crystalline form. Alternatively, delayed absorption of a parenterally administered drug form is accomplished by dissolving or suspending the drug in an oil vehicle. Injectable depot forms are made by forming microencapsule matrices of the drug in biodegradable polymers such as polylactide-polyglycolide. Depending upon the ratio of drug to polymer and the nature of the particular polymer employed, the rate of drug release can be controlled. Examples of other biodegradable polymers include poly(orthoesters) and poly(anhydrides). Depot injectable formulations are prepared by entrapping the drug in liposomes or microemulsions which are compatible with body tissues.

### Rectal and Vaginal Administration

[0569] Compositions for rectal or vaginal administration are typically suppositories which can be prepared by mixing compositions with suitable non-irritating excipients such as cocoa butter, polyethylene glycol or a suppository wax which are solid at ambient temperature but liquid at body temperature and therefore melt in the rectum or vaginal cavity and release the active ingredient.

### Oral Administration

[0570] Liquid dosage forms for oral administration include, but are not limited to, pharmaceutically acceptable emulsions, microemulsions, solutions, suspensions, syrups, and/or elixirs. In addition to active ingredients, liquid dosage forms may comprise inert diluents commonly used in the art such as, for example, water or other solvents, solubilizing agents and emulsifiers such as ethyl alcohol, isopropyl alcohol, ethyl carbonate, ethyl acetate, benzyl alcohol, benzyl benzoate, propylene glycol, 1,3-butylene glycol, dimethylformamide, oils (in particular, cottonseed, groundnut, corn, germ, olive, castor, and sesame oils), glycerol, tetrahydrofurfuryl alcohol, polyethylene glycols and fatty acid esters of sorbitan, and mixtures thereof. Besides inert diluents, oral compositions can include adjuvants such as wetting agents, emulsifying and suspending agents, sweetening, flavoring, and/or perfuming agents. In certain embodiments for parenteral administration, compositions are mixed with solubilizing agents such as CREMOPHOR®, alcohols, oils, modified oils, glycols, polysorbates, cyclodextrins, polymers, and/or combinations thereof

[0571] Solid dosage forms for oral administration include capsules, tablets, pills, powders, and granules. In such solid dosage forms, an active ingredient is mixed with at least one inert, pharmaceutically acceptable excipient such as sodium citrate or dicalcium phosphate and/or fillers or extenders (e.g. starches, lactose, sucrose, glucose, mannitol, and silicic acid), binders (e.g. carboxymethylcellulose, alginates, gelatin, polyvinylpyrrolidinone, sucrose, and acacia), humectants (e.g. glycerol), disintegrating agents (e.g. agar, calcium carbonate, potato or tapioca starch, alginic acid, certain silicates, and sodium carbonate), solution retarding agents (e.g. paraffin), absorption accelerators (e.g. quaternary ammonium compounds), wetting agents (e.g. cetyl alcohol and glycerol monostearate), absorbents (e.g. kaolin and bentonite clay), and lubricants (e.g. talc, calcium stearate, magnesium stearate, solid polyethylene glycols, sodium lauryl sulfate), and mixtures thereof. In the case of capsules, tablets and pills, the dosage form may comprise buffering agents.

### Topical or Transdermal Administration

[0572] As described herein, compositions containing the modified nucleic acid molecules or mRNA of the invention may be formulated for administration topically. The skin may be an ideal target site for delivery as it is readily accessible. Gene expression may be restricted not only to the skin, potentially avoiding nonspecific toxicity, but also to specific layers and cell types within the skin.

[0573] The site of cutaneous expression of the delivered compositions will depend on the route of nucleic acid delivery. Three routes are commonly considered to deliver modified nucleic acid molecules or mRNA to the skin: (i) topical application (e.g. for local/regional treatment); (ii) intradermal injection (e.g. for local/regional treatment); and (iii) systemic delivery (e.g. for treatment of dermatologic diseases that affect both cutaneous and extracutaneous regions). Modified nucleic acid molecules or mRNA can be delivered to the skin by several different approaches known in the art. Most topical delivery approaches have been shown to work for delivery of DNA, such as but not limited to, topical application of non-cationic liposome—DNA complex, cationic liposome—DNA complex, particle-mediated (gene gun), puncture-mediated gene transfections, and viral delivery approaches. After delivery of the nucleic acid, gene products have been detected in a number of different skin cell types, including, but not limited to, basal keratinocytes, sebaceous gland cells, dermal fibroblasts and dermal macrophages.

[0574] In one embodiment, the invention provides for a variety of dressings (e.g., wound dressings) or bandages (e.g., adhesive bandages) for conveniently and/or effectively carrying out methods of the present invention. Typically dressing or bandages may comprise sufficient amounts of pharmaceutical compositions and/or modified nucleic acid molecules or mRNA described herein to allow a user to perform multiple treatments of a subject(s).

[0575] In one embodiment, the invention provides for the modified nucleic acid molecules or mRNA compositions to be delivered in more than one injection.

[0576] In one embodiment, before topical and/or transdermal administration at least one area of tissue, such as skin, may be subjected to a device and/or solution which may increase permeability. In one embodiment, the tissue may be subjected to an abrasion device to increase the permeability of the skin (see U.S. Patent Publication No. 20080275468, herein incorporated by reference in its entirety). In another embodiment, the tissue may be subjected to an ultrasound enhancement device. An ultrasound enhancement device may include, but is not limited to, the devices described in U.S. Publication No. 20040236268 and U.S. Pat. Nos. 6,491,657 and 6,234,990; each of which are herein incorporated by reference in their entireties. Methods of enhancing the permeability of tissue are described in U.S. Publication Nos. 20040171980 and 20040236268 and U.S. Pat. No. 6,190,315; each of which are herein incorporated by reference in their entireties.

[0577] In one embodiment, a device may be used to increase permeability of tissue before delivering formulations of modified mRNA described herein. The permeability of skin may be measured by methods known in the art and/or described in U.S. Pat. No. 6,190,315, herein incorporated by reference in its entirety. As a non-limiting example, a modified mRNA formulation may be delivered by the drug delivery methods described in U.S. Pat. No. 6,190,315, herein incorporated by reference in its entirety.

[0578] In another non-limiting example tissue may be treated with a eutectic mixture of local anesthetics (EMLA) cream before, during and/or after the tissue may be subjected to a device which may increase permeability. Katz et al. (Anesth Analg (2004); 98:371-76; herein incorporated by reference in its entirety) showed that using the EMLA cream in combination with a low energy, an onset of superficial cutaneous analgesia was seen as fast as 5 minutes after a pretreatment with a low energy ultrasound.

[0579] In one embodiment, enhancers may be applied to the tissue before, during, and/or after the tissue has been treated to increase permeability. Enhancers include, but are not limited to, transport enhancers, physical enhancers, and cavitation enhancers. Non-limiting examples of enhancers are described in U.S. Pat. No. 6,190,315, herein incorporated by reference in its entirety.

[0580] In one embodiment, a device may be used to increase permeability of tissue before delivering formulations of modified mRNA described herein, which may further contain a substance that invokes an immune response. In another non-limiting example, a formulation containing a substance to invoke an immune response may be delivered by the methods described in U.S. Publication Nos. 20040171980 and 20040236268; each of which are herein incorporated by reference in their entireties.

[0581] Dosage forms for topical and/or transdermal administration of a composition may include ointments, pastes, creams, lotions, gels, powders, solutions, sprays, inhalants and/or patches. Generally, an active ingredient is admixed under sterile conditions with a pharmaceutically acceptable excipient and/or any needed preservatives and/or buffers as may be required.

[0582] Additionally, the present invention contemplates the use of transdermal patches, which often have the added advantage of providing controlled delivery of a compound to the body. Such dosage forms may be prepared, for example, by dissolving and/or dispensing the compound in the proper medium. Alternatively or additionally, rate may be controlled by either providing a rate controlling membrane and/or by dispersing the compound in a polymer matrix and/or gel.

[0583] Formulations suitable for topical administration include, but are not limited to, liquid and/or semi liquid preparations such as liniments, lotions, oil in water and/or water in oil emulsions such as creams, ointments and/or pastes, and/or solutions and/or suspensions. Topically-administrable formulations may, for example, comprise from about 0.1% to about 10% (w/w) active ingredient, although the concentration of active ingredient may be as high as the solubility limit of the active ingredient in the solvent. Formulations for topical administration may further comprise one or more of the additional ingredients described herein.

### Depot Administration

[0584] As described herein, in some embodiments, the composition is formulated in depots for extended release. Generally, a specific organ or tissue (a “target tissue”) is targeted for administration.

[0585] In some aspects of the invention, the modified nucleic acid molecules or mRNA are spatially retained within or proximal to a target tissue. Provided are method of providing a composition to a target tissue of a mammalian subject by contacting the target tissue (which contains one or more target cells) with the composition under conditions such that the composition, in particular the nucleic acid component(s) of the composition, is substantially retained in the target tissue, meaning that at least 10, 20, 30, 40, 50, 60, 70, 80, 85, 90, 95, 96, 97, 98, 99, 99.9, 99.99 or greater than 99.99% of the composition is retained in the target tissue. Advantageously, retention is determined by measuring the amount of the nucleic acid present in the composition that enters one or more target cells. For example, at least 1, 5, 10, 20, 30, 40, 50, 60, 70, 80, 85, 90, 95, 96, 97, 98, 99, 99.9, 99.99 or greater than 99.99% of the nucleic acids administered to the subject are present intracellularly at a period of time following administration. For example, intramuscular injection to a mammalian subject is performed using an aqueous composition containing a ribonucleic acid and a transfection reagent, and retention of the composition is determined by measuring the amount of the ribonucleic acid present in the muscle cells.

[0586] Aspects of the invention are directed to methods of providing a composition to a target tissue of a mammalian subject, by contacting the target tissue (containing one or more target cells) with the composition under conditions such that the composition is substantially retained in the target tissue. The composition contains an effective amount of a nucleic acid molecules or mRNA such that the polypeptide of interest is produced in at least one target cell. The compositions generally contain a cell penetration agent, although “naked” nucleic acid (such as nucleic acids without a cell penetration agent or other agent) is also contemplated, and a pharmaceutically acceptable carrier. In certain embodiments, the formulations include a pharmaceutically acceptable carrier that causes the effective amount of nucleic acid molecules to be substantially retained in a target tissue containing the cell.

[0587] In some circumstances, the amount of a protein produced by cells in a tissue is desirably increased. Preferably, this increase in protein production is spatially restricted to cells within the target tissue. Thus, provided are methods of increasing production of a protein of interest in a tissue of a mammalian subject. A composition is provided that contains modified nucleic acid molecule or mRNA characterized in that a unit quantity of composition has been determined to produce the polypeptide of interest in a substantial percentage of cells contained within a predetermined volume of the target tissue.

[0588] In another embodiment, compositions for generation of an in vivo depot containing a modified nucleic acid are provided. For example, the composition contains a bioerodible, biocompatible polymer, a solvent present in an amount effective to plasticize the polymer and form a gel therewith, and ribonucleic modified nucleic acid. In certain embodiments the composition also includes a cell penetration agent as described herein. In other embodiments, the composition also contains a thixotropic amount of a thixotropic agent mixable with the polymer so as to be effective to form a thixotropic composition. Further compositions include a stabilizing agent, a bulking agent, a chelating agent, or a buffering agent.

[0589] In other embodiments, provided are sustained-release delivery depots, such as for administration of a modified nucleic acid to an environment (meaning an organ or tissue site) in a patient. Such depots generally contain ribonucleic modified nucleic acid and a flexible chain polymer where both the modified nucleic acid and the flexible chain polymer are entrapped within a porous matrix of a crosslinked matrix protein. Usually, the pore size is less than 1 mm, such as 900 nm, 800 nm, 700 nm, 600 nm, 500 nm, 400 nm, 300 nm, 200 nm, 100 nm, or less than 100 nm. Usually the flexible chain polymer is hydrophilic. Usually the flexible chain polymer has a molecular weight of at least 50 kDa, such as 75 kDa, 100 kDa, 150 kDa, 200 kDa, 250 kDa, 300 kDa, 400 kDa, 500 kDa, or greater than 500 kDa. Usually the flexible chain polymer has a persistence length of less than 10%, such as 9, 8, 7, 6, 5, 4, 3, 2, 1 or less than 1% of the persistence length of the matrix protein. Usually the flexible chain polymer has a charge similar to that of the matrix protein. In some embodiments, the flexible chain polymer alters the effective pore size of a matrix of crosslinked matrix protein to a size capable of sustaining the diffusion of the engineered ribonucleic acid from the matrix into a surrounding tissue comprising a cell into which the modified nucleic acid is capable of entering.

[0590] In some embodiments, the composition includes a plurality of different modified nucleic acid molecules or mRNA, where one or more than one of the modified nucleic acid molecules or mRNA encodes a polypeptide of interest. Optionally, the composition also contains a cell penetration agent to assist in the intracellular delivery of the composition. A determination is made of the dose of the composition required to produce the polypeptide of interest in a substantial percentage of cells contained within the predetermined volume of the target tissue (generally, without inducing significant production of the polypeptide of interest in tissue adjacent to the predetermined volume, or distally to the target tissue). Subsequent to this determination, the determined dose is introduced directly into the tissue of the mammalian subject.

[0591] In one embodiment, the invention provides for the modified nucleic acid molecules or mRNA to be delivered in more than one injection or by split dose injections.

[0592] In one embodiment, the invention may be retained near target tissue using a small disposable drug reservoir, patch pump or osmotic pump. Non-limiting examples of patch pumps include those manufactured and/or sold by BD®, (Franklin Lakes, N.J.), Insulet Corporation (Bedford, Mass.), SteadyMed Therapeutics (San Francisco, Calif.), Medtronic (Minneapolis, Minn.) (e.g., MiniMed), UniLife (York, Pa.), Valeritas (Bridgewater, N.J.), and SpringLeaf Therapeutics (Boston, Mass.). A non-limiting example of an osmotic pump include those manufactured by DURECT® (Cupertino, Calif.) (e.g., DUROS® and ALZET®).

### Pulmonary Administration

[0593] A pharmaceutical composition may be prepared, packaged, and/or sold in a formulation suitable for pulmonary administration via the buccal cavity. Such a formulation may comprise dry particles which comprise the active ingredient and which have a diameter in the range from about 0.5 nm to about 7 nm or from about 1 nm to about 6 nm. Such compositions are suitably in the form of dry powders for administration using a device comprising a dry powder reservoir to which a stream of propellant may be directed to disperse the powder and/or using a self propelling solvent/powder dispensing container such as a device comprising the active ingredient dissolved and/or suspended in a low-boiling propellant in a sealed container. Such powders comprise particles wherein at least 98% of the particles by weight have a diameter greater than 0.5 nm and at least 95% of the particles by number have a diameter less than 7 nm. Alternatively, at least 95% of the particles by weight have a diameter greater than 1 nm and at least 90% of the particles by number have a diameter less than 6 nm. Dry powder compositions may include a solid fine powder diluent such as sugar and are conveniently provided in a unit dose form.

[0594] Low boiling propellants generally include liquid propellants having a boiling point of below 65° F. at atmospheric pressure. Generally the propellant may constitute 50% to 99.9% (w/w) of the composition, and active ingredient may constitute 0.1% to 20% (w/w) of the composition. A propellant may further comprise additional ingredients such as a liquid non-ionic and/or solid anionic surfactant and/or a solid diluent (which may have a particle size of the same order as particles comprising the active ingredient).

[0595] As a non-limiting example, the modified nucleic acid molecules or mRNA described herein may be formulated for pulmonary delivery by the methods described in U.S. Pat. No. 8,257,685; herein incorporated by reference in its entirety.

[0596] Pharmaceutical compositions formulated for pulmonary delivery may provide an active ingredient in the form of droplets of a solution and/or suspension. Such formulations may be prepared, packaged, and/or sold as aqueous and/or dilute alcoholic solutions and/or suspensions, optionally sterile, comprising active ingredient, and may conveniently be administered using any nebulization and/or atomization device. Such formulations may further comprise one or more additional ingredients including, but not limited to, a flavoring agent such as saccharin sodium, a volatile oil, a buffering agent, a surface active agent, and/or a preservative such as methylhydroxybenzoate. Droplets provided by this route of administration may have an average diameter in the range from about 0.1 nm to about 200 nm.

### Intranasal, Nasal and Buccal Administration

[0597] Formulations described herein as being useful for pulmonary delivery are useful for intranasal delivery of a pharmaceutical composition. Another formulation suitable for intranasal administration is a coarse powder comprising the active ingredient and having an average particle from about 0.2 μm to 500 μm. Such a formulation is administered in the manner in which snuff is taken, i.e. by rapid inhalation through the nasal passage from a container of the powder held close to the nose.

[0598] Formulations suitable for nasal administration may, for example, comprise from about as little as 0.1% (w/w) and as much as 100% (w/w) of active ingredient, and may comprise one or more of the additional ingredients described herein. A pharmaceutical composition may be prepared, packaged, and/or sold in a formulation suitable for buccal administration. Such formulations may, for example, be in the form of tablets and/or lozenges made using conventional methods, and may, for example, 0.1% to 20% (w/w) active ingredient, the balance comprising an orally dissolvable and/or degradable composition and, optionally, one or more of the additional ingredients described herein. Alternately, formulations suitable for buccal administration may comprise a powder and/or an aerosolized and/or atomized solution and/or suspension comprising active ingredient. Such powdered, aerosolized, and/or aerosolized formulations, when dispersed, may have an average particle and/or droplet size in the range from about 0.1 nm to about 200 nm, and may further comprise one or more of any additional ingredients described herein.

### Ophthalmic Administration

[0599] A pharmaceutical composition may be prepared, packaged, and/or sold in a formulation suitable for ophthalmic administration. Such formulations may, for example, be in the form of eye drops including, for example, a 0.1/1.0% (w/w) solution and/or suspension of the active ingredient in an aqueous or oily liquid excipient. Such drops may further comprise buffering agents, salts, and/or one or more other of any additional ingredients described herein. Other ophthalmically-administrable formulations which are useful include those which comprise the active ingredient in microcrystalline form and/or in a liposomal preparation. Ear drops and/or eye drops are contemplated as being within the scope of this invention. A multilayer thin film device may be prepared to contain a pharmaceutical composition for delivery to the eye and/or surrounding tissue.

### Payload Administration Detectable Agents and Therapeutic Agents

[0600] The modified nucleic acid molecules or mRNA described herein can be used in a number of different scenarios in which delivery of a substance (the “payload”) to a biological target is desired, for example delivery of detectable substances for detection of the target, or delivery of a therapeutic agent. Detection methods can include, but are not limited to, both imaging in vitro and in vivo imaging methods, e.g., immunohistochemistry, bioluminescence imaging (BLI), Magnetic Resonance Imaging (MRI), positron emission tomography (PET), electron microscopy, X-ray computed tomography, Raman imaging, optical coherence tomography, absorption imaging, thermal imaging, fluorescence reflectance imaging, fluorescence microscopy, fluorescence molecular tomographic imaging, nuclear magnetic resonance imaging, X-ray imaging, ultrasound imaging, photoacoustic imaging, lab assays, or in any situation where tagging/staining/imaging is required.

[0601] The modified nucleic acid molecules or mRNA can be designed to include both a linker and a payload in any useful orientation. In one embodiment, the modified nucleic acid molecule can be covalently linked at any chemically appropriate position to a payload, e.g. detectable agent or therapeutic agent. For example, a linker having two ends is used to attach one end to the payload and the other end to the nucleobase, such as at the C-7 or C-8 positions of the deaza-adenosine or deaza-guanosine or to the N-3 or C-5 positions of cytosine or uracil. The polynucleotide of the invention can include more than one payload (e.g., a label and a transcription inhibitor), as well as a cleavable linker.

[0602] In one embodiment, the modified nucleotide is a modified 7-deaza-adenosine triphosphate, where one end of a cleavable linker is attached to the C7 position of 7-deaza-adenine, the other end of the linker is attached to an inhibitor (e.g., to the C5 position of the nucleobase on a cytidine), and a label (e.g., Cy5) is attached to the center of the linker (see, e.g., compound I of A*pCp C5 Parg Capless in FIG. 5 and columns 9 and 10 of U.S. Pat. No. 7,994,304, incorporated herein by reference). Upon incorporation of the modified 7-deaza-adenosine triphosphate to an encoding region, the resulting polynucleotide having a cleavable linker attached to a label and an inhibitor (e.g., a polymerase inhibitor). Upon cleavage of the linker (e.g., with reductive conditions to reduce a linker having a cleavable disulfide moiety), the label and inhibitor are released. Additional linkers and payloads (e.g., therapeutic agents, detectable labels, and cell penetrating payloads) are described herein.

[0603] Scheme 12, below, depicts a modified nucleotide wherein the nucleobase, adenine, is attached to a linker at the C-7 carbon of 7-deaza adenine. In addition, Scheme 12 depicts the modified nucleotide with the linker and payload, e.g., a detectable agent, incorporated onto the 3′ end of the mRNA. Disulfide cleavage and a 1,2-addition of the thiol group onto the propargyl ester releases the detectable agent. The remaining structure (depicted, for example, as pApC5 Parg in Scheme 12) is the inhibitor. The structure of the modified nucleotide is important as the tethered inhibitor sterically interferes with the ability of the polymerase to incorporate a second base. Thus, it is critical that the tether be long enough to affect the incorporation of a second base and that the inhibiter be in a stereochemical orientation to inhibits or prohibits second and follow on nucleotides into the growing polynucleotide strand.

[chemical structure]

[chemical structure]

[0604] For example, the modified nucleic acid molecules or mRNA described herein can be used in reprogramming induced pluripotent stem cells (iPS cells), which can directly track cells that are transfected compared to total cells in the cluster. In another example, a drug that may be attached to the modified nucleic acid molecules or mRNA via a linker and may be fluorescently labeled can be used to track the drug in vivo, e.g. intracellularly. Other examples include, but are not limited to, the use of modified nucleic acid molecules or mRNA in reversible drug delivery into cells.

[0605] The modified nucleic acid molecules or mRNA described herein can be used in intracellular targeting of a payload, e.g., detectable or therapeutic agent, to specific organelle. Exemplary intracellular targets can include, but are not limited to, the nuclear localization for advanced mRNA processing, or a nuclear localization sequence (NLS) linked to the mRNA containing an inhibitor.

[0606] In addition, the modified nucleic acid molecules or mRNA described herein can be used to deliver therapeutic agents to cells or tissues, e.g., in living animals. For example, the modified nucleic acids or mRNA described herein can be used to deliver highly polar chemotherapeutics agents to kill cancer cells. The modified nucleic acid molecules or mRNA attached to the therapeutic agent through a linker can facilitate member permeation allowing the therapeutic agent to travel into a cell to reach an intracellular target.

[0607] In one example, the linker is attached at the 2′-position of the ribose ring and/or at the 3′ and/or 5′ position of the modified nucleic acid molecule or mRNA (See e.g., International Pub. No. WO2012030683, herein incorporated by reference in its entirety). The linker may be any linker disclosed herein, known in the art and/or disclosed in International Pub. No. WO2012030683, herein incorporated by reference in its entirety.

[0608] In another example, the modified nucleic acid molecules or mRNA can be attached to the modified nucleic acid molecules or mRNA a viral inhibitory peptide (VIP) through a cleavable linker. The cleavable linker can release the VIP and dye into the cell. In another example, the modified nucleic acid molecules or mRNA can be attached through the linker to an ADP-ribosylate, which is responsible for the actions of some bacterial toxins, such as cholera toxin, diphtheria toxin, and pertussis toxin. These toxin proteins are ADP-ribosyltransferases that modify target proteins in human cells. For example, cholera toxin ADP-ribosylates G proteins modifies human cells by causing massive fluid secretion from the lining of the small intestine, which results in life-threatening diarrhea.

[0609] In some embodiments the payload may be a therapeutic agent such as a cytotoxin, radioactive ion, chemotherapeutic, or other therapeutic agent. A cytotoxin or cytotoxic agent includes any agent that may be detrimental to cells. Examples include, but are not limited to, taxol, cytochalasin B, gramicidin D, ethidium bromide, emetine, mitomycin, etoposide, tenoposide, vincristine, vinblastine, colchicin, doxorubicin, daunorubicin, dihydroxy anthracin dione, mitoxantrone, mithramycin, actinomycin D, 1-dehydrotestosterone, glucocorticoids, procaine, tetracaine, lidocaine, propranolol, puromycin, maytansinoids, e.g., maytansinol (see U.S. Pat. No. 5,208,020 incorporated herein in its entirety), CC-1065 (see U.S. Pat. Nos. 5,475,092, 5,585,499, 5,846,545; all of which are incorporated herein by reference) and analogs or homologs thereof. Radioactive ions include, but are not limited to iodine (e.g., iodine 125 or iodine 131), strontium 89, phosphorous, palladium, cesium, iridium, phosphate, cobalt, yttrium 90, Samarium 153 and praseodymium. Other therapeutic agents include, but are not limited to, antimetabolites (e.g., methotrexate, 6-mercaptopurine, 6-thioguanine, cytarabine, 5-fluorouracil decarbazine), alkylating agents (e.g., mechlorethamine, thioepa chlorambucil, CC-1065, melphalan, carmustine (BSNU) and lomustine (CCNU), cyclothosphamide, busulfan, dibromomannitol, streptozotocin, mitomycin C, and cis-dichlorodiamine platinum (II) (DDP) cisplatin), anthracyclines (e.g., daunorubicin (formerly daunomycin) and doxorubicin), antibiotics (e.g., dactinomycin (formerly actinomycin), bleomycin, mithramycin, and anthramycin (AMC)), and anti-mitotic agents (e.g., vincristine, vinblastine, taxol and maytansinoids).

[0610] In some embodiments, the payload may be a detectable agent, such as, but not limited to, various organic small molecules, inorganic compounds, nanoparticles, enzymes or enzyme substrates, fluorescent materials, luminescent materials (e.g., luminol), bioluminescent materials (e.g., luciferase, luciferin, and aequorin), chemiluminescent materials, radioactive materials (e.g., ¹⁸F, ⁶⁷Ga, ^{81m}Kr, ⁸²Rb, ¹¹¹In, ¹²³I, ¹³³Xe, ²⁰¹Tl, ¹²⁵I, ³⁵S, ¹⁴C, ³H, or ^{99m}Tc (e.g., as pertechnetate (technetate(VII), TcO₄⁻)), and contrast agents (e.g., gold (e.g., gold nanoparticles), gadolinium (e.g., chelated Gd), iron oxides (e.g., superparamagnetic iron oxide (SPIO), monocrystalline iron oxide nanoparticles (MIONs), and ultrasmall superparamagnetic iron oxide (USPIO)), manganese chelates (e.g., Mn-DPDP), barium sulfate, iodinated contrast media (iohexyl), microbubbles, or perfluorocarbons). Such optically-detectable labels include for example, without limitation, 4-acetamido-4′-isothiocyanatostilbene-2,2′ disulfonic acid; acridine and derivatives (e.g., acridine and acridine isothiocyanate); 5-(2′-aminoethyl)aminonaphthalene-1-sulfonic acid (EDANS); 4-amino-N-[3-vinylsulfonyl)phenyl]naphthalimide-3,5 disulfonate; N-(4-anilino-1-naphthyl)maleimide; anthranilamide; BODIPY; Brilliant Yellow; coumarin and derivatives (e.g., coumarin, 7-amino-4-methylcoumarin (AMC, Coumarin 120), and 7-amino-4-trifluoromethylcoumarin (Coumarin 151)); cyanine dyes; cyanosine; 4′,6-diaminidino-2-phenylindole (DAPI); 5′ 5″-dibromopyrogallol-sulfonaphthalein (Bromopyrogallol Red); 7-diethylamino-3-(4′-isothiocyanatophenyl)-4-methylcoumarin; diethylenetriamine pentaacetate; 4,4′-diisothiocyanatodihydro-stilbene-2,2′-disulfonic acid; 4,4′-diisothiocyanatostilbene-2,2′-disulfonic acid; 5-[dimethylamino]-naphthalene-1-sulfonyl chloride (DNS, dansylchloride); 4-dimethylaminophenylazophenyl-4′-isothiocyanate (DABITC); eosin and derivatives (e.g., eosin and eosin isothiocyanate); erythrosin and derivatives (e.g., erythrosin B and erythrosin isothiocyanate); ethidium; fluorescein and derivatives (e.g., 5-carboxyfluorescein (FAM), 5-(4,6-dichlorotriazin-2-yl)aminofluorescein (DTAF), 2′,7′-dimethoxy-4′5′-dichloro-6-carboxyfluorescein, fluorescein, fluorescein isothiocyanate, X-rhodamine-5-(and -6)-isothiocyanate (QFITC or XRITC), and fluorescamine); 2-[2-[3-[[1,3-dihydro-1,1-dimethyl-3-(3-sulfopropyl)-2H-benz[e]indol-2-ylidene]ethylidene]-2-[4-(ethoxycarbonyl)-1-piperazinyl]-1-cyclopenten-1-yl]ethenyl]-1,1-dimethyl-3-(3-sulforpropyl)-1H-benz[e]indolium hydroxide, inner salt, compound with n,n-diethylethanamine(1:1) (IR144); 5-chloro-2-[2-[3-[(5-chloro-3-ethyl-2(3H)-benzothiazol-ylidene)ethylidene]-2-(diphenylamino)-1-cyclopenten-1-yl]ethenyl]-3-ethyl benzothiazolium perchlorate (IR140); Malachite Green isothiocyanate; 4-methylumbelliferone orthocresolphthalein; nitrotyrosine; pararosaniline; Phenol Red; B-phycoerythrin; o-phthaldialdehyde; pyrene and derivatives (e.g., pyrene, pyrene butyrate, and succinimidyl 1-pyrene); butyrate quantum dots; Reactive Red 4 (Cibacron™ Brilliant Red 3B-A); rhodamine and derivatives (e.g., 6-carboxy-X-rhodamine (ROX), 6-carboxyrhodamine (R6G), lissamine rhodamine B sulfonyl chloride rhodamine (Rhod), rhodamine B, rhodamine 123, rhodamine X isothiocyanate, sulforhodamine B, sulforhodamine 101, sulfonyl chloride derivative of sulforhodamine 101 (Texas Red), N,N,N′,N′tetramethyl-6-carboxyrhodamine (TAMRA) tetramethyl rhodamine, and tetramethyl rhodamine isothiocyanate (TRITC)); riboflavin; rosolic acid; terbium chelate derivatives; Cyanine-3 (Cy3); Cyanine-5 (Cy5); cyanine-5.5 (Cy5.5), Cyanine-7 (Cy7); IRD 700; IRD 800; Alexa 647; La Jolta Blue; phthalo cyanine; and naphthalo cyanine. In some embodiments, the detectable label may be a fluorescent dye, such as Cy5 and Cy3.

[0611] In some embodiments, the detectable agent may be a non-detectable pre-cursor that becomes detectable upon activation (e.g., fluorogenic tetrazine-fluorophore constructs (e.g., tetrazine-BODIPY FL, tetrazine-Oregon Green 488, or tetrazine-BODIPY TMR-X) or enzyme activatable fluorogenic agents (e.g., PROSENSE® (VisEn Medical))). In vitro assays in which the enzyme labeled compositions can be used include, but are not limited to, enzyme linked immunosorbent assays (ELISAs), immunoprecipitation assays, immunofluorescence, enzyme immunoassays (EIA), radioimmunoassays (RIA), and Western blot analysis.

[0612] When the compounds are enzymatically labeled with, for example, horseradish peroxidase, alkaline phosphatase, or luciferase, the enzymatic label may be detected by the determination of the conversion of an appropriate substrate to a product.

[0613] Labels, other than those described herein, are contemplated by the present disclosure, including, but not limited to, other optically-detectable labels. Labels can be attached to the modified nucleotide of the present disclosure at any position using standard chemistries such that the label can be removed from the incorporated base upon cleavage of the cleavable linker

### Combinations

[0614] The nucleic acid molecules or mRNA may be used in combination with one or more other therapeutic, prophylactic, diagnostic, or imaging agents. By “in combination with,” it is not intended to imply that the agents must be administered at the same time and/or formulated for delivery together, although these methods of delivery are within the scope of the present disclosure. Compositions can be administered concurrently with, prior to, or subsequent to, one or more other desired therapeutics or medical procedures. In general, each agent will be administered at a dose and/or on a time schedule determined for that agent. In some embodiments, the present disclosure encompasses the delivery of pharmaceutical, prophylactic, diagnostic, or imaging compositions in combination with agents that may improve their bioavailability, reduce and/or modify their metabolism, inhibit their excretion, and/or modify their distribution within the body. As a non-limiting example, the nucleic acid molecules or mRNA may be used in combination with a pharmaceutical agent for the treatment of cancer or to control hyperproliferative cells. In U.S. Pat. No. 7,964,571, herein incorporated by reference in its entirety, a combination therapy for the treatment of solid primary or metastasized tumor is described using a pharmaceutical composition including a DNA plasmid encoding for interleukin-12 with a lipopolymer and also administering at least one anticancer agent or chemotherapeutic. Further, the nucleic acid molecules and mRNA of the present invention that encodes anti-proliferative molecules may be in a pharmaceutical composition with a lipopolymer (see e.g., U.S. Pub. No. 20110218231, herein incorporated by reference in its entirety, claiming a pharmaceutical composition comprising a DNA plasmid encoding an anti-proliferative molecule and a lipopolymer) which may be administered with at least one chemotherapeutic or anticancer agent.

### Cell Penetrating Payloads

[0615] In some embodiments, the modified nucleotides and modified nucleic acid molecules, which are incorporated into a nucleic acid, e.g., RNA or mRNA, can also include a payload that can be a cell penetrating moiety or agent that enhances intracellular delivery of the compositions. For example, the compositions can include, but are not limited to, a cell-penetrating peptide sequence that facilitates delivery to the intracellular space, e.g., HIV-derived TAT peptide, penetratins, transportans, or hCT derived cell-penetrating peptides, see, e.g., Caron et al., (2001) Mol. Ther. 3(3):310-8; Langel, Cell-Penetrating Peptides: Processes and Applications (CRC Press, Boca Raton Fla. 2002); El-Andaloussi et al., (2005) Curr Pharm Des. 11(28):3597-611; and Deshayes et al., (2005) Cell Mol Life Sci. 62 (16):1839-49; all of which are incorporated herein by reference. The compositions can also be formulated to include a cell penetrating agent, e.g., liposomes, which enhance delivery of the compositions to the intracellular space.

### Biological Targets

[0616] The modified nucleotides and modified nucleic acid molecules described herein, which are incorporated into a nucleic acid, e.g., RNA or mRNA, can be used to deliver a payload to any biological target for which a specific ligand exists or can be generated. The ligand can bind to the biological target either covalently or non-covalently.

[0617] Examples of biological targets include, but are not limited to, biopolymers, e.g., antibodies, nucleic acids such as RNA and DNA, proteins, enzymes; examples of proteins include, but are not limited to, enzymes, receptors, and ion channels. In some embodiments the target may be a tissue- or a cell-type specific marker, e.g., a protein that is expressed specifically on a selected tissue or cell type. In some embodiments, the target may be a receptor, such as, but not limited to, plasma membrane receptors and nuclear receptors; more specific examples include, but are not limited to, G-protein-coupled receptors, cell pore proteins, transporter proteins, surface-expressed antibodies, HLA proteins, MHC proteins and growth factor receptors.

### Dosing

[0618] The present invention provides methods comprising administering modified mRNAs and their encoded proteins or complexes in accordance with the invention to a subject in need thereof. Nucleic acids, proteins or complexes, or pharmaceutical, imaging, diagnostic, or prophylactic compositions thereof, may be administered to a subject using any amount and any route of administration effective for preventing, treating, diagnosing, or imaging a disease, disorder, and/or condition (e.g., a disease, disorder, and/or condition relating to working memory deficits). The exact amount required will vary from subject to subject, depending on the species, age, and general condition of the subject, the severity of the disease, the particular composition, its mode of administration, its mode of activity, and the like. Compositions in accordance with the invention are typically formulated in dosage unit form for ease of administration and uniformity of dosage. It will be understood, however, that the total daily usage of the compositions of the present invention may be decided by the attending physician within the scope of sound medical judgment. The specific therapeutically effective, prophylactically effective, or appropriate imaging dose level for any particular patient will depend upon a variety of factors including the disorder being treated and the severity of the disorder; the activity of the specific compound employed; the specific composition employed; the age, body weight, general health, sex and diet of the patient; the time of administration, route of administration, and rate of excretion of the specific compound employed; the duration of the treatment; drugs used in combination or coincidental with the specific compound employed; and like factors well known in the medical arts.

[0619] In certain embodiments, compositions in accordance with the present invention may be administered at dosage levels sufficient to deliver from about 0.0001 mg/kg to about 100 mg/kg, from about 0.001 mg/kg to about 0.05 mg/kg, from about 0.005 mg/kg to about 0.05 mg/kg, from about 0.001 mg/kg to about 0.005 mg/kg, from about 0.05 mg/kg to about 0.5 mg/kg, from about 0.01 mg/kg to about 50 mg/kg, from about 0.1 mg/kg to about 40 mg/kg, from about 0.5 mg/kg to about 30 mg/kg, from about 0.01 mg/kg to about 10 mg/kg, from about 0.1 mg/kg to about 10 mg/kg, or from about 1 mg/kg to about 25 mg/kg, of subject body weight per day, one or more times a day, to obtain the desired therapeutic, diagnostic, prophylactic, or imaging effect. The desired dosage may be delivered three times a day, two times a day, once a day, every other day, every third day, every week, every two weeks, every three weeks, or every four weeks. In certain embodiments, the desired dosage may be delivered using multiple administrations (e.g., two, three, four, five, six, seven, eight, nine, ten, eleven, twelve, thirteen, fourteen, or more administrations).

[0620] According to the present invention, it has been discovered that administration of mRNA in split-dose regimens produce higher levels of proteins in mammalian subjects. As used herein, a “split dose” is the division of single unit dose or total daily dose into two or more doses, e.g, two or more administrations of the single unit dose. As used herein, a “single unit dose” is a dose of any therapeutic administed in one dose/at one time/single route/single point of contact, i.e., single administration event. As used herein, a “total daily dose” is an amount given or prescribed in 24 hr period. It may be administered as a single unit dose. In one embodiment, the mRNA of the present invention are administed to a subject in split doses. The mRNA may be formulated in buffer only or in a formulation described herein.

### Dosage Forms

[0621] A pharmaceutical composition described herein can be formulated into a dosage form described herein, such as a topical, intranasal, intratracheal, or injectable (e.g., intravenous, intraocular, intravitreal, intramuscular, intracardiac, intraperitoneal, subcutaneous).

### Liquid Dosage Forms

[0622] Liquid dosage forms for parenteral administration include, but are not limited to, pharmaceutically acceptable emulsions, microemulsions, solutions, suspensions, syrups, and/or elixirs. In addition to active ingredients, liquid dosage forms may comprise inert diluents commonly used in the art including, but not limited to, water or other solvents, solubilizing agents and emulsifiers such as ethyl alcohol, isopropyl alcohol, ethyl carbonate, ethyl acetate, benzyl alcohol, benzyl benzoate, propylene glycol, 1,3-butylene glycol, dimethylformamide, oils (in particular, cottonseed, groundnut, corn, germ, olive, castor, and sesame oils), glycerol, tetrahydrofurfuryl alcohol, polyethylene glycols and fatty acid esters of sorbitan, and mixtures thereof. In certain embodiments for parenteral administration, compositions may be mixed with solubilizing agents such as CREMOPHOR®, alcohols, oils, modified oils, glycols, polysorbates, cyclodextrins, polymers, and/or combinations thereof.

### Injectable

[0623] Injectable preparations, for example, sterile injectable aqueous or oleaginous suspensions may be formulated according to the known art and may include suitable dispersing agents, wetting agents, and/or suspending agents. Sterile injectable preparations may be sterile injectable solutions, suspensions, and/or emulsions in nontoxic parenterally acceptable diluents and/or solvents, for example, a solution in 1,3-butanediol. Among the acceptable vehicles and solvents that may be employed include, but are not limited to, water, Ringer's solution, U.S.P., and isotonic sodium chloride solution. Sterile, fixed oils are conventionally employed as a solvent or suspending medium. For this purpose any bland fixed oil can be employed including synthetic mono- or diglycerides. Fatty acids such as oleic acid can be used in the preparation of injectables.

[0624] Injectable formulations can be sterilized, for example, by filtration through a bacterial-retaining filter, and/or by incorporating sterilizing agents in the form of sterile solid compositions which can be dissolved or dispersed in sterile water or other sterile injectable medium prior to use.

[0625] In order to prolong the effect of an active ingredient, it may be desirable to slow the absorption of the active ingredient from subcutaneous or intramuscular injection. This may be accomplished by the use of a liquid suspension of crystalline or amorphous material with poor water solubility. The rate of absorption of modified mRNA then depends upon its rate of dissolution which, in turn, may depend upon crystal size and crystalline form. Alternatively, delayed absorption of a parenterally administered modified mRNA may be accomplished by dissolving or suspending the modified mRNA in an oil vehicle. Injectable depot forms are made by forming microencapsule matrices of the modified mRNA in biodegradable polymers such as polylactide-polyglycolide. Depending upon the ratio of modified mRNA to polymer and the nature of the particular polymer employed, the rate of modified mRNA release can be controlled. Examples of other biodegradable polymers include, but are not limited to, poly(orthoesters) and poly(anhydrides). Depot injectable formulations may be prepared by entrapping the modified mRNA in liposomes or microemulsions which are compatible with body tissues.

### Pulmonary

[0626] Formulations described herein as being useful for pulmonary delivery may also be used for intranasal delivery of a pharmaceutical composition. Another formulation suitable for intranasal administration may be a coarse powder comprising the active ingredient and having an average particle from about 0.2 μm to 500 μm. Such a formulation may be administered in the manner in which snuff is taken, i.e. by rapid inhalation through the nasal passage from a container of the powder held close to the nose.

[0627] Formulations suitable for nasal administration may, for example, comprise from about as little as 0.1% (w/w) and as much as 100% (w/w) of active ingredient, and may comprise one or more of the additional ingredients described herein. A pharmaceutical composition may be prepared, packaged, and/or sold in a formulation suitable for buccal administration. Such formulations may, for example, be in the form of tablets and/or lozenges made using conventional methods, and may, for example, contain about 0.1% to 20% (w/w) active ingredient, where the balance may comprise an orally dissolvable and/or degradable composition and, optionally, one or more of the additional ingredients described herein. Alternately, formulations suitable for buccal administration may comprise a powder and/or an aerosolized and/or atomized solution and/or suspension comprising active ingredient. Such powdered, aerosolized, and/or aerosolized formulations, when dispersed, may have an average particle and/or droplet size in the range from about 0.1 nm to about 200 nm, and may further comprise one or more of any additional ingredients described herein.

[0628] General considerations in the formulation and/or manufacture of pharmaceutical agents may be found, for example, in Remington: The Science and Practice of Pharmacy 21^{st} ed., Lippincott Williams & Wilkins, 2005 (incorporated herein by reference in its entirety).

### Coatings or Shells

[0629] Solid dosage forms of tablets, dragees, capsules, pills, and granules can be prepared with coatings and shells such as enteric coatings and other coatings well known in the pharmaceutical formulating art. They may optionally comprise opacifying agents and can be of a composition that they release the active ingredient(s) only, or preferentially, in a certain part of the intestinal tract, optionally, in a delayed manner. Examples of embedding compositions which can be used include polymeric substances and waxes. Solid compositions of a similar type may be employed as fillers in soft and hard-filled gelatin capsules using such excipients as lactose or milk sugar as well as high molecular weight polyethylene glycols and the like.

### Properties of the Pharmaceutical Compositions

[0630] The pharmaceutical compositions described herein can be characterized by one or more of the following properties:

### Bioavailability

[0631] The modified nucleic acid molecules, when formulated into a composition with a delivery agent as described herein, can exhibit an increase in bioavailability as compared to a composition lacking a delivery agent as described herein. As used herein, the term “bioavailability” refers to the systemic availability of a given amount of a modified nucleic acid molecule administered to a mammal. Bioavailability can be assessed by measuring the area under the curve (AUC) or the maximum serum or plasma concentration (Cₘₐₓ) of the unchanged form of a compound following administration of the compound to a mammal. AUC is a determination of the area under the curve plotting the serum or plasma concentration of a compound along the ordinate (Y-axis) against time along the abscissa (X-axis). Generally, the AUC for a particular compound can be calculated using methods known to those of ordinary skill in the art and as described in G. S. Banker, Modern Pharmaceutics, Drugs and the Pharmaceutical Sciences, v. 72, Marcel Dekker, New York, Inc., 1996, herein incorporated by reference.

[0632] The Cₘₐₓ value is the maximum concentration of the compound achieved in the serum or plasma of a mammal following administration of the compound to the mammal. The Cₘₐₓ value of a particular compound can be measured using methods known to those of ordinary skill in the art. The phrases “increasing bioavailability” or “improving the pharmacokinetics,” as used herein mean that the systemic availability of a first modified nucleic acid molecule, measured as AUC, Cₘₐₓ, or Cₘᵢₙ in a mammal is greater, when co-administered with a delivery agent as described herein, than when such co-administration does not take place. In some embodiments, the bioavailability of the modified nucleic acid molecule can increase by at least about 2%, at least about 5%, at least about 10%, at least about 15%, at least about 20%, at least about 25%, at least about 30%, at least about 35%, at least about 40%, at least about 45%, at least about 50%, at least about 55%, at least about 60%, at least about 65%, at least about 70%, at least about 75%, at least about 80%, at least about 85%, at least about 90%, at least about 95%, or about 100%.

### Therapeutic Window

[0633] The modified nucleic acid molecules, when formulated into a composition with a delivery agent as described herein, can exhibit an increase in the therapeutic window of the administered modified nucleic acid molecule composition as compared to the therapeutic window of the administered modified nucleic acid molecule composition lacking a delivery agent as described herein. As used herein “therapeutic window” refers to the range of plasma concentrations, or the range of levels of therapeutically active substance at the site of action, with a high probability of eliciting a therapeutic effect. In some embodiments, the therapeutic window of the modified nucleic acid molecule when co-administered with a delivery agent as described herein can increase by at least about 2%, at least about 5%, at least about 10%, at least about 15%, at least about 20%, at least about 25%, at least about 30%, at least about 35%, at least about 40%, at least about 45%, at least about 50%, at least about 55%, at least about 60%, at least about 65%, at least about 70%, at least about 75%, at least about 80%, at least about 85%, at least about 90%, at least about 95%, or about 100%.

### Volume of Distribution

[0634] The modified nucleic acid molecules, when formulated into a composition with a delivery agent as described herein, can exhibit an improved volume of distribution (V_{dist}), e.g., reduced or targeted, relative to a modified nucleic acid molecule composition lacking a delivery agent as described herein. The volume of distribution (V_{dist}) relates the amount of the drug in the body to the concentration of the drug in the blood or plasma. As used herein, the term “volume of distribution” refers to the fluid volume that would be required to contain the total amount of the drug in the body at the same concentration as in the blood or plasma: V_{dist} equals the amount of drug in the body/concentration of drug in blood or plasma. For example, for a 10 mg dose and a plasma concentration of 10 mg/L, the volume of distribution would be 1 liter. The volume of distribution reflects the extent to which the drug is present in the extravascular tissue. A large volume of distribution reflects the tendency of a compound to bind to the tissue components compared with plasma protein binding. In a clinical setting, V_{dist} can be used to determine a loading dose to achieve a steady state concentration. In some embodiments, the volume of distribution of the modified nucleic acid molecule when co-administered with a delivery agent as described herein can decrease at least about 2%, at least about 5%, at least about 10%, at least about 15%, at least about 20%, at least about 25%, at least about 30%, at least about 35%, at least about 40%, at least about 45%, at least about 50%, at least about 55%, at least about 60%, at least about 65%, at least about 70%.

### Biological Effect

[0635] In one embodiment, the biological effect of the modified mRNA delivered to the animals may be categorized by analyzing the protein expression in the animals. The protein expression may be determined from analyzing a biological sample collected from a mammal administered the modified mRNA of the present invention. In one embodiment, the expression protein encoded by the modified mRNA administered to the mammal of at least 50 pg/ml may be preferred. For example, a protein expression of 50-200 pg/ml for the protein encoded by the modified mRNA delivered to the mammal may be seen as a therapeutically effective amount of protein in the mammal.

### Detection of Modified Nucleic Acids by Mass Spectrometry

[0636] Mass spectrometry (MS) is an analytical technique that can provide structural and molecular mass/concentration information on molecules after their conversion to ions. The molecules are first ionized to acquire positive or negative charges and then they travel through the mass analyzer to arrive at different areas of the detector according to their mass/charge (m/z) ratio.

[0637] Mass spectrometry is performed using a mass spectrometer which includes an ion source for ionizing the fractionated sample and creating charged molecules for further analysis. For example ionization of the sample may be performed by electrospray ionization (ESI), atmospheric pressure chemical ionization (APCI), photoionization, electron ionization, fast atom bombardment (FAB)/liquid secondary ionization (LSIMS), matrix assisted laser desorption/ionization (MALDI), field ionization, field desorption, thermospray/plasmaspray ionization, and particle beam ionization. The skilled artisan will understand that the choice of ionization method can be determined based on the analyte to be measured, type of sample, the type of detector, the choice of positive versus negative mode, etc.

[0638] After the sample has been ionized, the positively charged or negatively charged ions thereby created may be analyzed to determine a mass-to-charge ratio (i.e., m/z). Suitable analyzers for determining mass-to-charge ratios include quadropole analyzers, ion traps analyzers, and time-of-flight analyzers. The ions may be detected using several detection modes. For example, selected ions may be detected (i.e., using a selective ion monitoring mode (SIM)), or alternatively, ions may be detected using a scanning mode, e.g., multiple reaction monitoring (MRM) or selected reaction monitoring (SRM).

[0639] Liquid chromatography-multiple reaction monitoring (LC-MS/MRM) coupled with stable isotope labeled dilution of peptide standards has been shown to be an effective method for protein verification (e.g., Keshishian et al., Mol Cell Proteomics 2009 8: 2339-2349; Kuhn et al., Clin Chem 2009 55:1108-1117; Lopez et al., Clin Chem 2010 56:281-290; each of which are herein incorporated by reference in its entirety). Unlike untargeted mass spectrometry frequently used in biomarker discovery studies, targeted MS methods are peptide sequence-based modes of MS that focus the full analytical capacity of the instrument on tens to hundreds of selected peptides in a complex mixture. By restricting detection and fragmentation to only those peptides derived from proteins of interest, sensitivity and reproducibility are improved dramatically compared to discovery-mode MS methods. This method of mass spectrometry-based multiple reaction monitoring (MRM) quantitation of proteins can dramatically impact the discovery and quantitation of biomarkers via rapid, targeted, multiplexed protein expression profiling of clinical samples.

[0640] In one embodiment, a biological sample which may contain at least one protein encoded by at least one modified mRNA of the present invention may be analyzed by the method of MRM-MS. The quantification of the biological sample may further include, but is not limited to, isotopically labeled peptides or proteins as internal standards.

[0641] According to the present invention, the biological sample, once obtained from the subject, may be subjected to enzyme digestion. As used herein, the term “digest” means to break apart into shorter peptides. As used herein, the phrase “treating a sample to digest proteins” means manipulating a sample in such a way as to break down proteins in a sample. These enzymes include, but are not limited to, trypsin, endoproteinase Glu-C and chymotrypsin. In one embodiment, a biological sample which may contain at least one protein encoded by at least one modified mRNA of the present invention may be digested using enzymes.

[0642] In one embodiment, a biological sample which may contain protein encoded by modified mRNA of the present invention may be analyzed for protein using electrospray ionization. Electrospray ionization (ESI) mass spectrometry (ESIMS) uses electrical energy to aid in the transfer of ions from the solution to the gaseous phase before they are analyzed by mass spectrometry. Samples may be analyzed using methods known in the art (e.g., Ho et al., Clin Biochem Rev. 2003 24(1):3-12; herein incorporated by reference in its entirety). The ionic species contained in solution may be transferred into the gas phase by dispersing a fine spray of charge droplets, evaporating the solvent and ejecting the ions from the charged droplets to generate a mist of highly charged droplets. The mist of highly charged droplets may be analyzed using at least 1, at least 2, at least 3 or at least 4 mass analyzers such as, but not limited to, a quadropole mass analyzer. Further, the mass spectrometry method may include a purification step. As a non-limiting example, the first quadrapole may be set to select a single m/z ratio so it may filter out other molecular ions having a different m/z ratio which may eliminate complicated and time-consuming sample purification procedures prior to MS analysis.

[0643] In one embodiment, a biological sample which may contain protein encoded by modified mRNA of the present invention may be analyzed for protein in a tandem ESIMS system (e.g., MS/MS). As non-limiting examples, the droplets may be analyzed using a product scan (or daughter scan) a precursor scan (parent scan) a neutral loss or a multiple reaction monitoring.

[0644] In one embodiment, a biological sample which may contain protein encoded by modified mRNA of the present invention may be analyzed using matrix-assisted laser desorption/ionization (MALDI) mass spectrometry (MALDIMS). MALDI provides for the nondestructive vaporization and ionization of both large and small molecules, such as proteins. In MALDI analysis, the analyte is first co-crystallized with a large molar excess of a matrix compound, which may also include, but is not limited to, an ultraviolet absorbing weak organic acid. Non-limiting examples of matrices used in MALDI are α-cyano-4-hydroxycinnamic acid, 3,5-dimethoxy-4-hydroxycinnamic acid and 2,5-dihydroxybenzoic acid. Laser radiation of the analyte-matrix mixture may result in the vaporization of the matrix and the analyte. The laser induced desorption provides high ion yields of the intact analyte and allows for measurement of compounds with high accuracy. Samples may be analyzed using methods known in the art (e.g., Lewis, Wei and Siuzdak, Encyclopedia of Analytical Chemistry 2000:5880-5894; herein incorporated by reference in its entirety). As non-limiting examples, mass analyzers used in the MALDI analysis may include a linear time-of-flight (TOF), a TOF reflectron or a Fourier transform mass analyzer.

[0645] In one embodiment, the analyte-matrix mixture may be formed using the dried-droplet method. A biologic sample is mixed with a matrix to create a saturated matrix solution where the matrix-to-sample ratio is approximately 5000:1. An aliquot (approximately 0.5-2.0 uL) of the saturated matrix solution is then allowed to dry to form the analyte-matrix mixture.

[0646] In one embodiment, the analyte-matrix mixture may be formed using the thin-layer method. A matrix homogeneous film is first formed and then the sample is then applied and may be absorbed by the matrix to form the analyte-matrix mixture.

[0647] In one embodiment, the analyte-matrix mixture may be formed using the thick-layer method. A matrix homogeneous film is formed with a nitro-cellulose matrix additive. Once the uniform nitro-cellulose matrix layer is obtained the sample is applied and absorbed into the matrix to form the analyte-matrix mixture.

[0648] In one embodiment, the analyte-matrix mixture may be formed using the sandwich method. A thin layer of matrix crystals is prepared as in the thin-layer method followed by the addition of droplets of aqueous trifluoroacetic acid, the sample and matrix. The sample is then absorbed into the matrix to form the analyte-matrix mixture.

### Kits and Devices

### Kits

[0649] The invention provides a variety of kits for conveniently and/or effectively carrying out methods of the present invention. Typically kits will comprise sufficient amounts and/or numbers of components to allow a user to perform multiple treatments of a subject(s) and/or to perform multiple experiments.

[0650] In one aspect, the present invention provides kits for protein production, comprising a first modified nucleic acid molecule or mRNA comprising a translatable region. The kit may further comprise packaging and instructions and/or a delivery agent to form a formulation composition. The delivery agent may comprise a saline, a buffered solution, a lipidoid or any delivery agent disclosed herein.

[0651] In one aspect, the present invention provides kits for protein production, comprising a first isolated nucleic acid comprising a translatable region and a nucleic acid modification, wherein the nucleic acid may be capable of evading an innate immune response of a cell into which the first isolated nucleic acid may be introduced, and packaging and instructions. The kit may further comprise a delivery agent to form a formulation composition. The delivery composition may comprise a lipidoid. The lipoid may be selected from the group consisting of C12-200, 98N12-5 and MD1.

[0652] In one embodiment, the buffer solution may include sodium chloride, calcium chloride, phosphate and/or EDTA. In another embodiment, the buffer solution may include, but is not limited to, saline, saline with 2 mM calcium, 5% sucrose, 5% sucrose with 2 mM calcium, 5% Mannitol, 5% Mannitol with 2 mM calcium, Ringer's lactate, sodium chloride, sodium chloride with 2 mM calcium and mannose (See e.g., U.S. Pub. No. 20120258046; herein incorporated by reference in its entirety). In a further embodiment, the buffer solutions may be precipitated or it may be lyophilized. The amount of each component may be varied to enable consistent, reproducible higher concentration saline or simple buffer formulations. The components may also be varied in order to increase the stability of modified nucleic acid molecules and mRNA in the buffer solution over a period of time and/or under a variety of conditions.

[0653] In one aspect, the present invention provides kits for protein production, comprising: a first isolated nucleic acid comprising a translatable region, provided in an amount effective to produce a desired amount of a protein encoded by the translatable region when introduced into a target cell; a second nucleic acid comprising an inhibitory nucleic acid, provided in an amount effective to substantially inhibit the innate immune response of the cell; and packaging and instructions.

[0654] In one aspect, the present invention provides kits for protein production, comprising a modified nucleic acid molecule or mRNA comprising a translatable region, wherein the nucleic acid exhibits reduced degradation by a cellular nuclease, and packaging and instructions.

[0655] In one aspect, the present invention provides kits for protein production, comprising a first isolated nucleic acid comprising a translatable region and a nucleoside modification, wherein the nucleic acid exhibits reduced degradation by a cellular nuclease, and packaging and instructions.

[0656] In one aspect, the present invention provides kits for protein production, comprising a first isolated nucleic acid comprising a translatable region and at least two different nucleoside modifications, wherein the nucleic acid exhibits reduced degradation by a cellular nuclease, and packaging and instructions.

[0657] In one aspect, the present invention provides kits for protein production, comprising a first isolated nucleic acid comprising a translatable region and at least one nucleoside modification, wherein the nucleic acid exhibits reduced degradation by a cellular nuclease; a second nucleic acid comprising an inhibitory nucleic acid; and packaging and instructions.

[0658] In some embodiments, the first isolated nucleic acid comprises messenger RNA (mRNA). In some embodiments the mRNA comprises at least one nucleoside selected from the group consisting of pyridin-4-one ribonucleoside, 5-aza-uridine, 2-thio-5-aza-uridine, 2-thiouridine, 4-thio-pseudouridine, 2-thio-pseudouridine, 5-hydroxyuridine, 3-methyluridine, 5-carboxymethyl-uridine, 1-carboxymethyl-pseudouridine, 5-propynyl-uridine, 1-propynyl-pseudouridine, 5-taurinomethyluridine, 1-taurinomethyl-pseudouridine, 5-taurinomethyl-2-thio-uridine, 1-taurinomethyl-4-thio-uridine, 5-methyl-uridine, 1-methyl-pseudouridine, 4-thio-1-methyl-pseudouridine, 2-thio-1-methyl-pseudouridine, 1-methyl-1-deaza-pseudouridine, 2-thio-1-methyl-1-deaza-pseudouridine, dihydrouridine, dihydropseudouridine, 2-thio-dihydrouridine, 2-thio-dihydropseudouridine, 2-methoxyuridine, 2-methoxy-4-thio-uridine, 4-methoxy-pseudouridine, and 4-methoxy-2-thio-pseudouridine.

[0659] In some embodiments, the mRNA comprises at least one nucleoside selected from the group consisting of 5-aza-cytidine, pseudoisocytidine, 3-methyl-cytidine, N4-acetylcytidine, 5-formylcytidine, N4-methylcytidine, 5-hydroxymethylcytidine, 1-methyl-pseudoisocytidine, pyrrolo-cytidine, pyrrolo-pseudoisocytidine, 2-thio-cytidine, 2-thio-5-methyl-cytidine, 4-thio-pseudoisocytidine, 4-thio-1-methyl-pseudoisocytidine, 4-thio-1-methyl-1-deaza-pseudoisocytidine, 1-methyl-1-deaza-pseudoisocytidine, zebularine, 5-aza-zebularine, 5-methyl-zebularine, 5-aza-2-thio-zebularine, 2-thio-zebularine, 2-methoxy-cytidine, 2-methoxy-5-methyl-cytidine, 4-methoxy-pseudoisocytidine, and 4-methoxy-1-methyl-pseudoisocytidine.

[0660] In some embodiments, the mRNA comprises at least one nucleoside selected from the group consisting of 2-aminopurine, 2,6-diaminopurine, 7-deaza-adenine, 7-deaza-8-aza-adenine, 7-deaza-2-aminopurine, 7-deaza-8-aza-2-aminopurine, 7-deaza-2,6-diaminopurine, 7-deaza-8-aza-2,6-diaminopurine, 1-methyladenosine, N6-methyladenosine, N6-isopentenyladenosine, N6-(cis-hydroxyisopentenyl)adenosine, 2-methylthio-N6-(cis-hydroxyisopentenyl) adenosine, N6-glycinylcarbamoyladenosine, N6-threonylcarbamoyladenosine, 2-methylthio-N6-threonyl carbamoyladenosine, N6,N6-dimethyladenosine, 7-methyladenine, 2-methylthio-adenine, and 2-methoxy-adenine.

[0661] In some embodiments, the mRNA comprises at least one nucleoside selected from the group consisting of inosine, 1-methyl-inosine, wyosine, wybutosine, 7-deaza-guanosine, 7-deaza-8-aza-guanosine, 6-thio-guanosine, 6-thio-7-deaza-guanosine, 6-thio-7-deaza-8-aza-guanosine, 7-methyl-guanosine, 6-thio-7-methyl-guanosine, 7-methylinosine, 6-methoxy-guanosine, 1-methylguanosine, N2-methylguanosine, N2,N2-dimethylguanosine, 8-oxo-guanosine, 7-methyl-8-oxo-guanosine, 1-methyl-6-thio-guanosine, N2-methyl-6-thio-guanosine, and N2,N2-dimethyl-6-thio-guanosine.

[0662] In another aspect, the disclosure provides compositions for protein production, comprising a first isolated nucleic acid comprising a translatable region and a nucleoside modification, wherein the nucleic acid exhibits reduced degradation by a cellular nuclease, and a mammalian cell suitable for translation of the translatable region of the first nucleic acid.

### Devices

[0663] The present invention provides for devices, in particular portable devices, which incorporate modified nucleosides and nucleotides into nucleic acids such as ribonucleic acids (RNA) that encode proteins of interest. These devices contain in a stable formulation the reagents to synthesize a modified RNA in a formulation available to be immediately delivered to a subject in need thereof, such as a human patient. Non-limiting examples of such a protein of interest include a growth factor and/or angiogenesis stimulator for wound healing, a peptide antibiotic to facilitate infection control, and an antigen to rapidly stimulate an immune response to a newly identified virus.

[0664] In some embodiments the device is self-contained, and is optionally capable of wireless remote access to obtain instructions for synthesis and/or analysis of the generated nucleic acid. The device is capable of mobile synthesis of at least one nucleic acid, and preferably an unlimited number of different nucleic acid sequences. In certain embodiments, the device is capable of being transported by one or a small number of individuals. In other embodiments, the device is scaled to fit on a benchtop or desk. In other embodiments, the device is scaled to fit into a suitcase, backpack or similarly sized object. In further embodiments, the device is scaled to fit into a vehicle, such as a car, truck or ambulance, or a military vehicle such as a tank or personnel carrier. The information necessary to generate a modified mRNA encoding protein of interest is present within a computer readable medium present in the device.

[0665] In some embodiments, the device is capable of communication (e.g., wireless communication) with a database of nucleic acid and polypeptide sequences. The device contains at least one sample block for insertion of one or more sample vessels. Such sample vessels are capable of accepting in liquid or other form any number of materials such as template DNA, nucleotides, enzymes, buffers, and other reagents. The sample vessels are also capable of being heated and cooled by contact with the sample block. The sample block is generally in communication with a device base with one or more electronic control units for the at least one sample block. The sample block preferably contains a heating module, such heating molecule capable of heating and/or cooling the sample vessels and contents thereof to temperatures between about −20 C and above +100 C. The device base is in communication with a voltage supply such as a battery or external voltage supply. The device also contains means for storing and distributing the materials for RNA synthesis.

[0666] Optionally, the sample block contains a module for separating the synthesized nucleic acids. Alternatively, the device contains a separation module operably linked to the sample block. Preferably the device contains a means for analysis of the synthesized nucleic acid. Such analysis includes sequence identity (demonstrated such as by hybridization), absence of non-desired sequences, measurement of integrity of synthesized mRNA (such has by microfluidic viscometry combined with spectrophotometry), and concentration and/orpotency of modified RNA (such as by spectrophotometry).

[0667] In certain embodiments, the device is combined with a means for detection of pathogens present in a biological material obtained from a subject, e.g., the IBIS PLEX-ID system (Abbott) for microbial identification.

[0668] Suitable devices for use in delivering intradermal pharmaceutical compositions described herein include short needle devices such as those described in U.S. Pat. Nos. 4,886,499; 5,190,521; 5,328,483; 5,527,288; 4,270,537; 5,015,235; 5,141,496; and 5,417,662; each of which is herein incorporated by reference in their entirety. Intradermal compositions may be administered by devices which limit the effective penetration length of a needle into the skin, such as those described in PCT publication WO 99/34850 (herein incorporated by reference in its entirety) and functional equivalents thereof. Jet injection devices which deliver liquid compositions to the dermis via a liquid jet injector and/or via a needle which pierces the stratum corneum and produces a jet which reaches the dermis are suitable. Jet injection devices are described, for example, in U.S. Pat. Nos. 5,480,381; 5,599,302; 5,334,144; 5,993,412; 5,649,912; 5,569,189; 5,704,911; 5,383,851; 5,893,397; 5,466,220; 5,339,163; 5,312,335; 5,503,627; 5,064,413; 5,520,639; 4,596,556; 4,790,824; 4,941,880; 4,940,460; and PCT publications WO 97/37705 and WO 97/13537; each of which are herein incorporated by reference in their entirety. Ballistic powder/particle delivery devices which use compressed gas to accelerate vaccine in powder form through the outer layers of the skin to the dermis are suitable. Alternatively or additionally, conventional syringes may be used in the classical mantoux method of intradermal administration.

[0669] In some embodiments, the device may be a pump or comprise a catheter for administration of compounds or compositions of the invention across the blood brain barrier. Such devices include but are not limited to a pressurized olfactory delivery device, iontophoresis devices, multi-layered microfluidic devices, and the like. Such devices may be portable or stationary. They may be implantable or externally tethered to the body or combinations thereof.

[0670] Devices for administration may be employed to deliver the modified nucleic acid molecules or mRNA of the present invention according to single, multi- or split-dosing regimens taught herein. Such devices are described below.

[0671] Method and devices known in the art for multi-administration to cells, organs and tissues are contemplated for use in conjunction with the methods and compositions disclosed herein as embodiments of the present invention. These include, for example, those methods and devices having multiple needles, hybrid devices employing for example lumens or catheters as well as devices utilizing heat, electric current or radiation driven mechanisms.

[0672] According to the present invention, these multi-administration devices may be utilized to deliver the single, multi- or split doses contemplated herein.

[0673] A method for delivering therapeutic agents to a solid tissue has been described by Bahrami et al. and is taught for example in US Patent Publication 20110230839, the contents of which are incorporated herein by reference in their entirety. According to Bahrami, an array of needles is incorporated into a device which delivers a substantially equal amount of fluid at any location in said solid tissue along each needle's length.

[0674] A device for delivery of biological material across the biological tissue has been described by Kodgule et al. and is taught for example in US Patent Publication 20110172610, the contents of which are incorporated herein by reference in their entirety. According to Kodgule, multiple hollow micro-needles made of one or more metals and having outer diameters from about 200 microns to about 350 microns and lengths of at least 100 microns are incorporated into the device which delivers peptides, proteins, carbohydrates, nucleic acid molecules, lipids and other pharmaceutically active ingredients or combinations thereof.

[0675] A delivery probe for delivering a therapeutic agent to a tissue has been described by Gunday et al. and is taught for example in US Patent Publication 20110270184, the contents of each of which are incorporated herein by reference in their entirety. According to Gunday, multiple needles are incorporated into the device which moves the attached capsules between an activated position and an inactivated position to force the agent out of the capsules through the needles.

[0676] A multiple-injection medical apparatus has been described by Assaf and is taught for example in US Patent Publication 20110218497, the contents of which are incorporated herein by reference in their entirety. According to Assaf, multiple needles are incorporated into the device which has a chamber connected to one or more of said needles and a means for continuously refilling the chamber with the medical fluid after each injection.

[0677] In one embodiment, the modified nucleic acid molecule or mRNA is administered subcutaneously or intramuscularly via at least 3 needles to three different, optionally adjacent, sites simultaneously, or within a 60 minutes period (e.g., administration to 4, 5, 6, 7, 8, 9, or 10 sites simultaneously or within a 60 minute period). The split doses can be administered simultaneously to adjacent tissue using the devices described in U.S. Patent Publication Nos. 20110230839 and 20110218497, each of which is incorporated herein by reference in their entirety.

[0678] An at least partially implantable system for injecting a substance into a patient's body, in particular a penis erection stimulation system has been described by Forsell and is taught for example in US Patent Publication 20110196198, the contents of which are incorporated herein by reference in their entirety. According to Forsell, multiple needles are incorporated into the device which is implanted along with one or more housings adjacent the patient's left and right corpora cavernosa. A reservoir and a pump are also implanted to supply drugs through the needles.

[0679] A method for the transdermal delivery of a therapeutic effective amount of iron has been described by Berenson and is taught for example in US Patent Publication 20100130910, the contents of which are incorporated herein by reference in their entirety. According to Berenson, multiple needles may be used to create multiple micro channels in stratum corneum to enhance transdermal delivery of the ionic iron on an iontophoretic patch.

[0680] A method for delivery of biological material across the biological tissue has been described by Kodgule et al and is taught for example in US Patent Publication 20110196308, the contents of which are incorporated herein by reference in their entirety. According to Kodgule, multiple biodegradable microneedles containing a therapeutic active ingredient are incorporated in a device which delivers proteins, carbohydrates, nucleic acid molecules, lipids and other pharmaceutically active ingredients or combinations thereof.

[0681] A transdermal patch comprising a botulinum toxin composition has been described by Donovan and is taught for example in US Patent Publication 20080220020, the contents of which are incorporated herein by reference in their entirety. According to Donovan, multiple needles are incorporated into the patch which delivers botulinum toxin under stratum corneum through said needles which project through the stratum corneum of the skin without rupturing a blood vessel.

[0682] A small, disposable drug reservoir, or patch pump, which can hold approximately 0.2 to 15 mL of liquid formulations can be placed on the skin and deliver the formulation continuously subcutaneously using a small bore needed (e.g., 26 to 34 gauge). As non-limiting examples, the patch pump may be 50 mm by 76 mm by 20 mm spring loaded having a 30 to 34 gauge needle (BD™ Microinfuser, Franklin Lakes N.J.), 41 mm by 62 mm by 17 mm with a 2 mL reservoir used for drug delivery such as insulin (OMNIPOD®, Insulet Corporation Bedford, Mass.), or 43-60 mm diameter, 10 mm thick with a 0.5 to 10 mL reservoir (PATCHPUMP®, SteadyMed Therapeutics, San Francisco, Calif.). Further, the patch pump may be battery powered and/or rechargeable.

[0683] A cryoprobe for administration of an active agent to a location of cryogenic treatment has been described by Toubia and is taught for example in US Patent Publication 20080140061, the contents of which are incorporated herein by reference in their entirety. According to Toubia, multiple needles are incorporated into the probe which receives the active agent into a chamber and administers the agent to the tissue.

[0684] A method for treating or preventing inflammation or promoting healthy joints has been described by Stock et al and is taught for example in US Patent Publication 20090155186, the contents of which are incorporated herein by reference in their entirety. According to Stock, multiple needles are incorporated in a device which administers compositions containing signal transduction modulator compounds.

[0685] A multi-site injection system has been described by Kimmell et al. and is taught for example in US Patent Publication 20100256594, the contents of which are incorporated herein by reference in their entirety. According to Kimmell, multiple needles are incorporated into a device which delivers a medication into a stratum corneum through the needles.

[0686] A method for delivering interferons to the intradermal compartment has been described by Dekker et al. and is taught for example in US Patent Publication 20050181033, the contents of which are incorporated herein by reference in their entirety. According to Dekker, multiple needles having an outlet with an exposed height between 0 and 1 mm are incorporated into a device which improves pharmacokinetics and bioavailability by delivering the substance at a depth between 0.3 mm and 2 mm.

[0687] A method for delivering genes, enzymes and biological agents to tissue cells has described by Desai and is taught for example in US Patent Publication 20030073908, the contents of which are incorporated herein by reference in their entirety. According to Desai, multiple needles are incorporated into a device which is inserted into a body and delivers a medication fluid through said needles.

[0688] A method for treating cardiac arrhythmias with fibroblast cells has been described by Lee et al and is taught for example in US Patent Publication 20040005295, the contents of which are incorporated herein by reference in their entirety. According to Lee, multiple needles are incorporated into the device which delivers fibroblast cells into the local region of the tissue.

[0689] A method using a magnetically controlled pump for treating a brain tumor has been described by Shachar et al. and is taught for example in U.S. Pat. No. 7,799,012 (method) and 7,799,016 (device), the contents of which are incorporated herein by reference in their entirety. According Shachar, multiple needles were incorporated into the pump which pushes a medicating agent through the needles at a controlled rate.

[0690] Methods of treating functional disorders of the bladder in mammalian females have been described by Versi et al. and are taught for example in U.S. Pat. No. 8,029,496, the contents of which are incorporated herein by reference in their entirety. According to Versi, an array of micro-needles is incorporated into a device which delivers a therapeutic agent through the needles directly into the trigone of the bladder.

[0691] A micro-needle transdermal transport device has been described by Angel et al and is taught for example in U.S. Pat. No. 7,364,568, the contents of which are incorporated herein by reference in their entirety. According to Angel, multiple needles are incorporated into the device which transports a substance into a body surface through the needles which are inserted into the surface from different directions. The micro-needle transdermal transport device may be a solid micro-needle system or a hollow micro-needle system. As a non-limiting example, the solid micro-needle system may have up to a 0.5 mg capacity, with 300-1500 solid micro-needles per cm² about 150-700 μm tall coated with a drug. The micro-needles penetrate the stratum corneum and remain in the skin for short duration (e.g., 20 seconds to 15 minutes). In another example, the hollow micro-needle system has up to a 3 mL capacity to deliver liquid formulations using 15-20 microneedles per cm2 being approximately 950 μm tall. The micro-needles penetrate the skin to allow the liquid formulations to flow from the device into the skin. The hollow micro-needle system may be worn from 1 to 30 minutes depending on the formulation volume and viscocity.

[0692] A device for subcutaneous infusion has been described by Dalton et al and is taught for example in U.S. Pat. No. 7,150,726, the contents of which are incorporated herein by reference in their entirety. According to Dalton, multiple needles are incorporated into the device which delivers fluid through the needles into a subcutaneous tissue.

[0693] A device and a method for intradermal delivery of vaccines and gene therapeutic agents through microcannula have been described by Mikszta et al. and are taught for example in U.S. Pat. No. 7,473,247, the contents of which are incorporated herein by reference in their entirety. According to Mitszta, at least one hollow micro-needle is incorporated into the device which delivers the vaccines to the subject's skin to a depth of between 0.025 mm and 2 mm.

[0694] A method of delivering insulin has been described by Pettis et al and is taught for example in U.S. Pat. No. 7,722,595, the contents of which are incorporated herein by reference in their entirety. According to Pettis, two needles are incorporated into a device wherein both needles insert essentially simultaneously into the skin with the first at a depth of less than 2.5 mm to deliver insulin to intradermal compartment and the second at a depth of greater than 2.5 mm and less than 5.0 mm to deliver insulin to subcutaneous compartment.

[0695] Cutaneous injection delivery under suction has been described by Kochamba et al. and is taught for example in U.S. Pat. No. 6,896,666, the contents of which are incorporated herein by reference in their entirety. According to Kochamba, multiple needles in relative adjacency with each other are incorporated into a device which injects a fluid below the cutaneous layer.

[0696] A device for withdrawing or delivering a substance through the skin has been described by Down et al and is taught for example in U.S. Pat. No. 6,607,513, the contents of which are incorporated herein by reference in their entirety. According to Down, multiple skin penetrating members which are incorporated into the device have lengths of about 100 microns to about 2000 microns and are about 30 to 50 gauge.

[0697] A device for delivering a substance to the skin has been described by Palmer et al and is taught for example in U.S. Pat. No. 6,537,242, the contents of which are incorporated herein by reference in their entirety. According to Palmer, an array of micro-needles is incorporated into the device which uses a stretching assembly to enhance the contact of the needles with the skin and provides a more uniform delivery of the substance.

[0698] A perfusion device for localized drug delivery has been described by Zamoyski and is taught for example in U.S. Pat. No. 6,468,247, the contents of which are incorporated herein by reference in their entirety. According to Zamoyski, multiple hypodermic needles are incorporated into the device which injects the contents of the hypodermics into a tissue as said hypodermics are being retracted.

[0699] A method for enhanced transport of drugs and biological molecules across tissue by improving the interaction between micro-needles and human skin has been described by Prausnitz et al. and is taught for example in U.S. Pat. No. 6,743,211, the contents of which are incorporated herein by reference in their entirety. According to Prausnitz, multiple micro-needles are incorporated into a device which is able to present a more rigid and less deformable surface to which the micro-needles are applied.

[0700] A device for intraorgan administration of medicinal agents has been described by Ting et al and is taught for example in U.S. Pat. No. 6,077,251, the contents of which are incorporated herein by reference in their entirety. According to Ting, multiple needles having side openings for enhanced administration are incorporated into a device which by extending and retracting said needles from and into the needle chamber forces a medicinal agent from a reservoir into said needles and injects said medicinal agent into a target organ.

[0701] A multiple needle holder and a subcutaneous multiple channel infusion port has been described by Brown and is taught for example in U.S. Pat. No. 4,695,273, the contents of which are incorporated herein by reference in their entirety. According to Brown, multiple needles on the needle holder are inserted through the septum of the infusion port and communicate with isolated chambers in said infusion port.

[0702] A dual hypodermic syringe has been described by Horn and is taught for example in U.S. Pat. No. 3,552,394, the contents of which are incorporated herein by reference in their entirety. According to Horn, two needles incorporated into the device are spaced apart less than 68 mm and may be of different styles and lengths, thus enabling injections to be made to different depths.

[0703] A syringe with multiple needles and multiple fluid compartments has been described by Hershberg and is taught for example in U.S. Pat. No. 3,572,336, the contents of which are incorporated herein by reference in their entirety. According to Hershberg, multiple needles are incorporated into the syringe which has multiple fluid compartments and is capable of simultaneously administering incompatible drugs which are not able to be mixed for one injection.

[0704] A surgical instrument for intradermal injection of fluids has been described by Eliscu et al. and is taught for example in U.S. Pat. No. 2,588,623, the contents of which are incorporated herein by reference in their entirety. According to Eliscu, multiple needles are incorporated into the instrument which injects fluids intradermally with a wider disperse.

[0705] An apparatus for simultaneous delivery of a substance to multiple breast milk ducts has been described by Hung and is taught for example in EP 1818017, the contents of which are incorporated herein by reference in their entirety. According to Hung, multiple lumens are incorporated into the device which inserts though the orifices of the ductal networks and delivers a fluid to the ductal networks.

[0706] A catheter for introduction of medications to the tissue of a heart or other organs has been described by Tkebuchava and is taught for example in WO2006138109, the contents of which are incorporated herein by reference in their entirety. According to Tkebuchava, two curved needles are incorporated which enter the organ wall in a flattened trajectory.

[0707] Devices for delivering medical agents have been described by Mckay et al. and are taught for example in WO2006118804, the content of which are incorporated herein by reference in their entirety. According to Mckay, multiple needles with multiple orifices on each needle are incorporated into the devices to facilitate regional delivery to a tissue, such as the interior disc space of a spinal disc.

[0708] A method for directly delivering an immunomodulatory substance into an intradermal space within a mammalian skin has been described by Pettis and is taught for example in WO2004020014, the contents of which are incorporated herein by reference in their entirety. According to Pettis, multiple needles are incorporated into a device which delivers the substance through the needles to a depth between 0.3 mm and 2 mm.

[0709] Methods and devices for administration of substances into at least two compartments in skin for systemic absorption and improved pharmacokinetics have been described by Pettis et al. and are taught for example in WO2003094995, the contents of which are incorporated herein by reference in their entirety. According to Pettis, multiple needles having lengths between about 300 lam and about 5 mm are incorporated into a device which delivers to intradermal and subcutaneous tissue compartments simultaneously.

[0710] A drug delivery device with needles and a roller has been described by Zimmerman et al. and is taught for example in WO2012006259, the contents of which are incorporated herein by reference in their entirety. According to Zimmerman, multiple hollow needles positioned in a roller are incorporated into the device which delivers the content in a reservoir through the needles as the roller rotates.

[0711] A drug delivery device such as a stent is known in the art and is taught for example in U.S. Pub. Nos. US20060020329, US20040172127 and US20100161032; the contents of which are herein incorporated by reference in their entirety. Formulations of the modified nucleic acid molecules and mRNA described herein may be delivered using stents. Additionally, stents used herein may be able to deliver multiple modified nucleic acid molecules and/or formulations at the same or varied rates of delivery. Non-limiting examples of manufacturers of stents include CORDIS® (Miami, Fla.) (CYPHER®), Boston Scientific Corporation (Natick, Mass.) (TAXUS®), Medtronic (Minneapolis, Minn.) (ENDEAVOUR®) and Abbott (Abbott Park, Ill.) (XIENCE V®).

[0712] Methods and devices describing ex vivo systems of organs, tissues and/or portions thereof are known in the art, are described by Ingber et al. and are taught for example in International Pub. No. WO2012166903; the contents of which is herein incorporated by reference in its entirety. According to Ingber, in one embodiment, tissue may be maintained ex vivo by implanting a device in a subject to be colonized by cells, removing the implantation device and tissue in the device and providing perfusion fluid to the tissue. In another embodiment, the tissue removed from the subject may be implanted into a second subject.

Methods and Devices Utilizing Catheters and/or Lumens

[0713] Methods and devices using catheters and lumens may be employed to administer the mRNA of the present invention on a single, multi- or split dosing schedule. Such methods and devices are described below.

[0714] A catheter-based delivery of skeletal myoblasts to the myocardium of damaged hearts has been described by Jacoby et al and is taught for example in US Patent Publication 20060263338, the contents of which are incorporated herein by reference in their entirety. According to Jacoby, multiple needles are incorporated into the device at least part of which is inserted into a blood vessel and delivers the cell composition through the needles into the localized region of the subject's heart.

[0715] An apparatus for treating asthma using neurotoxin has been described by Deem et al and is taught for example in US Patent Publication 20060225742, the contents of which are incorporated herein by reference in their entirety. According to Deem, multiple needles are incorporated into the device which delivers neurotoxin through the needles into the bronchial tissue.

[0716] A method for administering multiple-component therapies has been described by Nayak and is taught for example in U.S. Pat. No. 7,699,803, the contents of which are incorporated herein by reference in their entirety. According to Nayak, multiple injection cannulas may be incorporated into a device wherein depth slots may be included for controlling the depth at which the therapeutic substance is delivered within the tissue.

[0717] A surgical device for ablating a channel and delivering at least one therapeutic agent into a desired region of the tissue has been described by McIntyre et al and is taught for example in U.S. Pat. No. 8,012,096, the contents of which are incorporated herein by reference in their entirety. According to McIntyre, multiple needles are incorporated into the device which dispenses a therapeutic agent into a region of tissue surrounding the channel and is particularly well suited for transmyocardial revascularization operations.

[0718] Methods of treating functional disorders of the bladder in mammalian females have been described by Versi et al and are taught for example in U.S. Pat. No. 8,029,496, the contents of which are incorporated herein by reference in their entirety. According to Versi, an array of micro-needles is incorporated into a device which delivers a therapeutic agent through the needles directly into the trigone of the bladder.

[0719] A device and a method for delivering fluid into a flexible biological barrier have been described by Yeshurun et al. and are taught for example in U.S. Pat. No. 7,998,119 (device) and 8,007,466 (method), the contents of which are incorporated herein by reference in their entirety. According to Yeshurun, the micro-needles on the device penetrate and extend into the flexible biological barrier and fluid is injected through the bore of the hollow micro-needles.

[0720] A method for epicardially injecting a substance into an area of tissue of a heart having an epicardial surface and disposed within a torso has been described by Bonner et al and is taught for example in U.S. Pat. No. 7,628,780, the contents of which are incorporated herein by reference in their entirety. According to Bonner, the devices have elongate shafts and distal injection heads for driving needles into tissue and injecting medical agents into the tissue through the needles.

[0721] A device for sealing a puncture has been described by Nielsen et al and is taught for example in U.S. Pat. No. 7,972,358, the contents of which are incorporated herein by reference in their entirety. According to Nielsen, multiple needles are incorporated into the device which delivers a closure agent into the tissue surrounding the puncture tract.

[0722] A method for myogenesis and angiogenesis has been described by Chiu et al. and is taught for example in U.S. Pat. No. 6,551,338, the contents of which are incorporated herein by reference in their entirety. According to Chiu, 5 to 15 needles having a maximum diameter of at least 1.25 mm and a length effective to provide a puncture depth of 6 to 20 mm are incorporated into a device which inserts into proximity with a myocardium and supplies an exogeneous angiogenic or myogenic factor to said myocardium through the conduits which are in at least some of said needles.

[0723] A method for the treatment of prostate tissue has been described by Bolmsj et al. and is taught for example in U.S. Pat. No. 6,524,270, the contents of which are incorporated herein by reference in their entirety. According to Bolmsj, a device comprising a catheter which is inserted through the urethra has at least one hollow tip extendible into the surrounding prostate tissue. An astringent and analgesic medicine is administered through said tip into said prostate tissue.

[0724] A method for infusing fluids to an intraosseous site has been described by Findlay et al. and is taught for example in U.S. Pat. No. 6,761,726, the contents of which are incorporated herein by reference in their entirety. According to Findlay, multiple needles are incorporated into a device which is capable of penetrating a hard shell of material covered by a layer of soft material and delivers a fluid at a predetermined distance below said hard shell of material.

[0725] A device for injecting medications into a vessel wall has been described by Vigil et al. and is taught for example in U.S. Pat. No. 5,713,863, the contents of which are incorporated herein by reference in their entirety. According to Vigil, multiple injectors are mounted on each of the flexible tubes in the device which introduces a medication fluid through a multi-lumen catheter, into said flexible tubes and out of said injectors for infusion into the vessel wall.

[0726] A catheter for delivering therapeutic and/or diagnostic agents to the tissue surrounding a bodily passageway has been described by Faxon et al. and is taught for example in U.S. Pat. No. 5,464,395, the contents of which are incorporated herein by reference in their entirety. According to Faxon, at least one needle cannula is incorporated into the catheter which delivers the desired agents to the tissue through said needles which project outboard of the catheter.

[0727] Balloon catheters for delivering therapeutic agents have been described by Orr and are taught for example in WO2010024871, the contents of which are incorporated herein by reference in their entirety. According to Orr, multiple needles are incorporated into the devices which deliver the therapeutic agents to different depths within the tissue. In another aspect, drug-eluting balloons may be used to deliver the formulations described herein. The drug-eluting balloons may be used in target lesion applications such as, but are not limited to, in-stent restenosis, treating lesion in tortuous vessels, bifurcation lesions, femoral/popliteal lesions and below the knee lesions.

[0728] A device for delivering therapeutic agents (e.g., modified nucleic acid molecules or mRNA) to tissue disposed about a lumin has been described by Perry et al. and is taught for example in U.S. Pat. Pub. US20100125239, the contents of which are herein incorporated by reference in their entirety. According to Perry, the catheter has a balloon which may be coated with a therapeutic agent by methods known in the art and described in Perry. When the balloon expands, the therapeutic agent will contact the surrounding tissue. The device may additionally have a heat source to change the temperature of the coating on the balloon to release the thereapeutic agent to the tissue.

### Methods and Devices Utilizing Electrical Current

[0729] Methods and devices utilizing electric current may be employed to deliver the mRNA of the present invention according to the single, multi- or split dosing regimens taught herein. Such methods and devices are described below.

[0730] An electro collagen induction therapy device has been described by Marquez and is taught for example in US Patent Publication 20090137945, the contents of which are incorporated herein by reference in their entirety. According to Marquez, multiple needles are incorporated into the device which repeatedly pierce the skin and draw in the skin a portion of the substance which is applied to the skin first.

[0731] An electrokinetic system has been described by Etheredge et al. and is taught for example in US Patent Publication 20070185432, the contents of which are incorporated herein by reference in their entirety. According to Etheredge, micro-needles are incorporated into a device which drives by an electrical current the medication through the needles into the targeted treatment site.

[0732] An iontophoresis device has been described by Matsumura et al. and is taught for example in U.S. Pat. No. 7,437,189, the contents of which are incorporated herein by reference in their entirety. According to Matsumura, multiple needles are incorporated into the device which is capable of delivering ionizable drug into a living body at higher speed or with higher efficiency.

[0733] Intradermal delivery of biologically active agents by needle-free injection and electroporation has been described by Hoffmann et al and is taught for example in U.S. Pat. No. 7,171,264, the contents of which are incorporated herein by reference in their entirety. According to Hoffmann, one or more needle-free injectors are incorporated into an electroporation device and the combination of needle-free injection and electroporation is sufficient to introduce the agent into cells in skin, muscle or mucosa.

[0734] A method for electropermeabilization-mediated intracellular delivery has been described by Lundkvist et al. and is taught for example in U.S. Pat. No. 6,625,486, the contents of which are incorporated herein by reference in their entirety. According to Lundkvist, a pair of needle electrodes is incorporated into a catheter. Said catheter is positioned into a body lumen followed by extending said needle electrodes to penetrate into the tissue surrounding said lumen. Then the device introduces an agent through at least one of said needle electrodes and applies electric field by said pair of needle electrodes to allow said agent pass through the cell membranes into the cells at the treatment site.

[0735] A delivery system for transdermal immunization has been described by Levin et al. and is taught for example in WO2006003659, the contents of which are incorporated herein by reference in their entirety. According to Levin, multiple electrodes are incorporated into the device which applies electrical energy between the electrodes to generate micro channels in the skin to facilitate transdermal delivery.

[0736] A method for delivering RF energy into skin has been described by Schomacker and is taught for example in WO2011163264, the contents of which are incorporated herein by reference in their entirety. According to Schomacker, multiple needles are incorporated into a device which applies vacuum to draw skin into contact with a plate so that needles insert into skin through the holes on the plate and deliver RF energy.

[0737] Electroporation may be used to load cells, particles or vesicles with nucleic acids. Flow electroporation uses a flow of suspension which is subjected to an electric field.

[0738] Flow electroporation devices, methods and processes of electroporation have been described by Dzekunov et al and is taught for example in U.S. Pat. No. 7,029,916, U.S. Pat. No. 7,771,984, 7,141,425WO2003018751 WO2005113820, US20110065171; Holaday et al and is taught for example in U.S. Pat. No. 6,773,669, US20050019311; Meserol et al and is taught for example in U.S. Pat. No. 6,074,605 and U.S. Pat. No. 5,720,921, the contents of each of which is herein incorporated by reference in its entirety. According to Dzekunov, Holaday and Meserol a chamber containing electrodes may be used for electroporation of a sample (e.g., cell and tissue). In US20080138877, herein incorporated by reference in its entirety, Dzekunov describes an electroporation chamber which may contain a sample (e.g., a suspension of cells to be electroporated). According to Dzekunov in WO2007021993, the contents of which are herein incorporated by reference in their entirety, the electrodes may be placed in different positions (e.g., helical geometries) to achieve the optimal electric field. As a non-limiting example, a flow electroporation device may be used to produce an infectious vector (See e.g., U.S. Pat. No. 7,186,559, the contents of which are herein incorporated by reference in its entirety).

[0739] A method for optimizing electroporation has been described by Dzekunov and is taught for example in WO2010009252 and US20120088842, the contents of each of which are incorporated herein by reference in their entirety. According to Dzekunov electrical pulses are used with other electroporation parameters to increase the electrical conductivity in the electroporation medium.

[0740] A method for streaming electroporation has been described by Dzekunov et al and is taught for example in WO2004031353 and US20040115784, each of which is herein incorporated by reference in its entirety. According to Dzekunov electroporation may be effected by displacing a sample across electric field lines or a electric field which is substantially constant in terms of magnitude.

[0741] A method of using electroporation to load antigens into cells is described by Liu et al and is taught for example in US20040214333, US20060134067, WO2004074451 and WO2007028041, the contents of each are herein incorporated by reference in their entireties. In addition Liu et al also describes a method of gene transfer to cancer cells using electroporation in WO2006063301 and US2006165668, each of which are herein incorporated by reference in their entirety.

[0742] A method of transiently modifying cells using electroporation is described by Li et al and is taught for example in WO2009126789 and US20090257991, the contents of each of which are herein incorporated by reference in its entirety.

[0743] An apparatus and method for shielding electrodes during electroporation is described by Li et al and is taught for example in WO2007021994, the contents of which are herein incorporated by reference in their entirety. According to Li a barrier such as a conductive and water permeable barrier may be used in operative relation to the electrode.

[0744] A computerized electroporation device and method are described by Dzekunov et al, and is taught for example in WO2006060409 and U.S. Pat. No. 7,991,559, the contents of each of which are herein incorporated by reference in their entireties. According to Dzekunov the electroporation device may be a flow electroporation device controlled by a computer with user-defined processing controls.

### DEFINITIONS

[0745] At various places in the present specification, substituents of compounds of the present disclosure are disclosed in groups or in ranges. It is specifically intended that the present disclosure include each and every individual subcombination of the members of such groups and ranges. For example, the term “C₁₋₆ alkyl” is specifically intended to individually disclose methyl, ethyl, C₃ alkyl, C₄ alkyl, C₅ alkyl, and C₆ alkyl.

[0746] About: As used herein, the term “about” means +/−10% of the recited value.

[0747] Administered in combination: As used herein, the term “administered in combination” or “combined administration” means that two or more agents (e.g., a modified nucleic acid or mRNA encoding an anti-microbial polypeptide (e.g., an anti-bacterial polypeptide), e.g., an anti-microbial polypeptide described herein and an anti-microbial agent (e.g., an anti-microbial polypeptide or a small molecule anti-microbial compound described herein)) are administered to a subject at the same time or within an interval such that there may be an overlap of an effect of each agent on the patient. In some embodiments, they are administered within about 60, 30, 15, 10, 5, or 1 minute of one another. In some embodiments, the administrations of the agents are spaced sufficiently close together such that a combinatorial (e.g., a synergistic) effect is achieved.

[0748] Animal: As used herein, the term “animal” refers to any member of the animal kingdom. In some embodiments, “animal” refers to humans at any stage of development. In some embodiments, “animal” refers to non-human animals at any stage of development. In certain embodiments, the non-human animal is a mammal (e.g., a rodent, a mouse, a rat, a rabbit, a monkey, a dog, a cat, a sheep, cattle, a primate, or a pig). In some embodiments, animals include, but are not limited to, mammals, birds, reptiles, amphibians, fish, and worms. In some embodiments, the animal is a transgenic animal, genetically-engineered animal, or a clone.

[0749] Antigens of interest or desired antigens: As used herein, the terms “antigens of interest” or “desired antigens” include those proteins and other biomolecules provided herein that are immunospecifically bound by the antibodies and fragments, mutants, variants, and alterations thereof described herein. Examples of antigens of interest include, but are not limited to, insulin, insulin-like growth factor, hGH, tPA, cytokines, such as interleukins (IL), e.g., IL-1, IL-2, IL-3, IL-4, IL-5, IL-6, IL-7, IL-8, IL-9, IL-10, IL-11, IL-12, IL-13, IL-14, IL-15, IL-16, IL-17, IL-18, interferon (IFN) alpha, IFN beta, IFN gamma, IFN omega or IFN tau, tumor necrosis factor (TNF), such as TNF alpha and TNF beta, TNF gamma, TRAIL; G-CSF, GM-CSF, M-CSF, MCP-1 and VEGF.

[0750] Approximately: As used herein, the term “approximately” or “about,” as applied to one or more values of interest, refers to a value that is similar to a stated reference value. In certain embodiments, the term “approximately” or “about” refers to a range of values that fall within 25%, 20%, 19%, 18%, 17%, 16%, 15%, 14%, 13%, 12%, 11%, 10%, 9%, 8%, 7%, 6%, 5%, 4%, 3%, 2%, 1%, or less in either direction (greater than or less than) of the stated reference value unless otherwise stated or otherwise evident from the context (except where such number would exceed 100% of a possible value).

[0751] Associated with: As used herein, the terms “associated with,” “conjugated,” “linked,” “attached,” and “tethered,” when used with respect to two or more moieties, means that the moieties are physically associated or connected with one another, either directly or via one or more additional moieties that serves as a linking agent, to form a structure that is sufficiently stable so that the moieties remain physically associated under the conditions in which the structure is used, e.g., physiological conditions. An “association” need not be strictly through direct covalent chemical bonding. It may also suggest ionic or hydrogen bonding or a hybridization based connectivity sufficiently stable such that the “associated” entities remain physically associated.

[0752] Bifunctional: As used herein, the term “bifunctional” refers to any substance, molecule or moiety which is capable of or maintains at least two functions. The functions may effect the same outcome or a different outcome. The structure that produces the function may be the same or different. For example, bifunctional modified RNA of the present invention may encode a cytotoxic peptide (a first function) while those nucleosides which comprise the encoding RNA are, in and of themselves, cytotoxic (second function). In this example, delivery of the bifunctional modified RNA to a cancer cell would produce not only a peptide or protein molecule which may ameliorate or treat the cancer but would also deliver a cytotoxic payload of nucleosides to the cell should degradation, instead of translation of the modified RNA, occur.

[0753] Biocompatible: As used herein, the term “biocompatible” means compatible with living cells, tissues, organs or systems posing little to no risk of injury, toxicity or rejection by the immune system.

[0754] Biodegradable: As used herein, the term “biodegradable” means capable of being broken down into innocuous products by the action of living things.

[0755] Biologically active: As used herein, the phrase “biologically active” refers to a characteristic of any substance that has activity in a biological system and/or organism. For instance, a substance that, when administered to an organism, has a biological affect on that organism, is considered to be biologically active. In particular embodiments, a nucleic acid molecule of the present invention may be considered biologically active if even a portion of the nucleic acid molecule is biologically active or mimics an activity considered biologically relevant.

[0756] Chemical terms: The following provides the definition of various chemical terms from “acyl” to “thiol.”

[0757] The term “acyl,” as used herein, represents a hydrogen or an alkyl group (e.g., a haloalkyl group), as defined herein, that is attached to the parent molecular group through a carbonyl group, as defined herein, and is exemplified by formyl (i.e., a carboxyaldehyde group), acetyl, propionyl, butanoyl and the like. Exemplary unsubstituted acyl groups include from 1 to 7, from 1 to 11, or from 1 to 21 carbons. In some embodiments, the alkyl group is further substituted with 1, 2, 3, or 4 substituents as described herein.

[0758] The term “acylamino,” as used herein, represents an acyl group, as defined herein, attached to the parent molecular group though an amino group, as defined herein (i.e., —N(R^{N1})—C(O)—R, where R is H or an optionally substituted C₁₋₆, C₁₋₁₀, or C₁₋₂₀ alkyl group and R^{N1} is as defined herein). Exemplary unsubstituted acylamino groups include from 1 to 41 carbons (e.g., from 1 to 7, from 1 to 13, from 1 to 21, from 2 to 7, from 2 to 13, from 2 to 21, or from 2 to 41 carbons). In some embodiments, the alkyl group is further substituted with 1, 2, 3, or 4 substituents as described herein, and/or the amino group is —NH₂ or —NHR^{N1}, wherein R^{N1} is, independently, OH, NO₂, NH₂, NR^{N2}₂, SO₂OR^{N2}, SO₂R^{N2}, SOR^{N2}, alkyl, or aryl, and each R^{N2} can be H, alkyl, or aryl.

[0759] The term “acyloxy,” as used herein, represents an acyl group, as defined herein, attached to the parent molecular group though an oxygen atom (i.e., —O—C(O)—R, where R is H or an optionally substituted C₁₋₆, C₁₋₁₀, or C₁₋₂₀ alkyl group). Exemplary unsubstituted acyloxy groups include from 1 to 21 carbons (e.g., from 1 to 7 or from 1 to 11 carbons). In some embodiments, the alkyl group is further substituted with 1, 2, 3, or 4 substituents as described herein, and/or the amino group is —NH₂ or —NHR^{N1}, wherein R^{N1} is, independently, OH, NO₂, NH₂, NR^{N2}₂, SO₂OR^{N2}, SO₂R^{N2}, SOR^{N2}, alkyl, or aryl, and each R^{N2} can be H, alkyl, or aryl.

[0760] The term “alkaryl,” as used herein, represents an aryl group, as defined herein, attached to the parent molecular group through an alkylene group, as defined herein. Exemplary unsubstituted alkaryl groups are from 7 to 30 carbons (e.g., from 7 to 16 or from 7 to 20 carbons, such as C₁₋₆ alk-C₆₋₁₀ aryl, C₁₋₁₀ alk-C₆₋₁₀ aryl, or C₁₋₂₀ alk-C₆₋₁₀ aryl). In some embodiments, the alkylene and the aryl each can be further substituted with 1, 2, 3, or 4 substituent groups as defined herein for the respective groups. Other groups preceded by the prefix “alk-” are defined in the same manner, where “alk” refers to a C₁₋₆ alkylene, unless otherwise noted, and the attached chemical structure is as defined herein.

[0761] The term “alkcycloalkyl” represents a cycloalkyl group, as defined herein, attached to the parent molecular group through an alkylene group, as defined herein (e.g., an alkylene group of from 1 to 4, from 1 to 6, from 1 to 10, or form 1 to 20 carbons). In some embodiments, the alkylene and the cycloalkyl each can be further substituted with 1, 2, 3, or 4 substituent groups as defined herein for the respective group.

[0762] The term “alkenyl,” as used herein, represents monovalent straight or branched chain groups of, unless otherwise specified, from 2 to 20 carbons (e.g., from 2 to 6 or from 2 to 10 carbons) containing one or more carbon-carbon double bonds and is exemplified by ethenyl, 1-propenyl, 2-propenyl, 2-methyl-1-propenyl, 1-butenyl, 2-butenyl, and the like. Alkenyls include both cis and trans isomers. Alkenyl groups may be optionally substituted with 1, 2, 3, or 4 substituent groups that are selected, independently, from amino, aryl, cycloalkyl, or heterocyclyl (e.g., heteroaryl), as defined herein, or any of the exemplary alkyl substituent groups described herein.

[0763] The term “alkenyloxy” represents a chemical substituent of formula —OR, where R is a C₂₋₂₀ alkenyl group (e.g., C₂₋₆ or C₂₋₁₀ alkenyl), unless otherwise specified. Exemplary alkenyloxy groups include ethenyloxy, propenyloxy, and the like. In some embodiments, the alkenyl group can be further substituted with 1, 2, 3, or 4 substituent groups as defined herein (e.g., a hydroxy group).

[0764] The term “alkheteroaryl” refers to a heteroaryl group, as defined herein, attached to the parent molecular group through an alkylene group, as defined herein. Exemplary unsubstituted alkheteroaryl groups are from 2 to 32 carbons (e.g., from 2 to 22, from 2 to 18, from 2 to 17, from 2 to 16, from 3 to 15, from 2 to 14, from 2 to 13, or from 2 to 12 carbons, such as C₁₋₆ alk-C₁₋₁₂ heteroaryl, C₁₋₁₀ alk-C₁₋₁₂ heteroaryl, or C₁₋₂₀ alk-C₁₋₁₂ heteroaryl). In some embodiments, the alkylene and the heteroaryl each can be further substituted with 1, 2, 3, or 4 substituent groups as defined herein for the respective group. Alkheteroaryl groups are a subset of alkheterocyclyl groups.

[0765] The term “alkheterocyclyl” represents a heterocyclyl group, as defined herein, attached to the parent molecular group through an alkylene group, as defined herein. Exemplary unsubstituted alkheterocyclyl groups are from 2 to 32 carbons (e.g., from 2 to 22, from 2 to 18, from 2 to 17, from 2 to 16, from 3 to 15, from 2 to 14, from 2 to 13, or from 2 to 12 carbons, such as C₁₋₆ alk-C₁₋₁₂ heterocyclyl, C₁₋₁₀ alk-C₁₋₁₂ heterocyclyl, or C₁₋₂₀ alk-C₁₋₁₂ heterocyclyl). In some embodiments, the alkylene and the heterocyclyl each can be further substituted with 1, 2, 3, or 4 substituent groups as defined herein for the respective group.

[0766] The term “alkoxy” represents a chemical substituent of formula —OR, where R is a C₁₋₂₀ alkyl group (e.g., C₁₋₆ or C₁₋₁₀ alkyl), unless otherwise specified. Exemplary alkoxy groups include methoxy, ethoxy, propoxy (e.g., n-propoxy and isopropoxy), t-butoxy, and the like. In some embodiments, the alkyl group can be further substituted with 1, 2, 3, or 4 substituent groups as defined herein (e.g., hydroxy or alkoxy).

[0767] The term “alkoxyalkoxy” represents an alkoxy group that is substituted with an alkoxy group. Exemplary unsubstituted alkoxyalkoxy groups include between 2 to 40 carbons (e.g., from 2 to 12 or from 2 to 20 carbons, such as C₁₋₆ alkoxy-C₁₋₆ alkoxy, C₁₋₁₀ alkoxy-C₁₋₁₀ alkoxy, or C₁₋₂₀ alkoxy-C₁₋₂₀ alkoxy). In some embodiments, the each alkoxy group can be further substituted with 1, 2, 3, or 4 substituent groups as defined herein.

[0768] The term “alkoxyalkyl” represents an alkyl group that is substituted with an alkoxy group. Exemplary unsubstituted alkoxyalkyl groups include between 2 to 40 carbons (e.g., from 2 to 12 or from 2 to 20 carbons, such as C₁₋₆ alkoxy-C₁₋₆ alkyl, C₁₋₁₀ alkoxy-C₁₋₁₀ alkyl, or C₁₋₂₀ alkoxy-C₁₋₂₀ alkyl). In some embodiments, the alkyl and the alkoxy each can be further substituted with 1, 2, 3, or 4 substituent groups as defined herein for the respective group.

[0769] The term “alkoxycarbonyl,” as used herein, represents an alkoxy, as defined herein, attached to the parent molecular group through a carbonyl atom (e.g., —C(O)—OR, where R is H or an optionally substituted C₁₋₆, C₁₋₁₀, or C₁₋₂₀ alkyl group). Exemplary unsubstituted alkoxycarbonyl include from 1 to 21 carbons (e.g., from 1 to 11 or from 1 to 7 carbons). In some embodiments, the alkoxy group is further substituted with 1, 2, 3, or 4 substituents as described herein.

[0770] The term “alkoxycarbonylalkoxy,” as used herein, represents an alkoxy group, as defined herein, that is substituted with an alkoxycarbonyl group, as defined herein (e.g., —O-alkyl-C(O)—OR, where R is an optionally substituted C₁₋₆, C₁₋₁₀, or C₁₋₂₀ alkyl group). Exemplary unsubstituted alkoxycarbonylalkoxy include from 3 to 41 carbons (e.g., from 3 to 10, from 3 to 13, from 3 to 17, from 3 to 21, or from 3 to 31 carbons, such as C₁₋₆ alkoxycarbonyl-C₁₋₆ alkoxy, C₁₋₁₀ alkoxycarbonyl-C₁₋₁₀ alkoxy, or C₁₋₂₀ alkoxycarbonyl-C₁₋₂₀ alkoxy). In some embodiments, each alkoxy group is further independently substituted with 1, 2, 3, or 4 substituents, as described herein (e.g., a hydroxy group).

[0771] The term “alkoxycarbonylalkyl,” as used herein, represents an alkyl group, as defined herein, that is substituted with an alkoxycarbonyl group, as defined herein (e.g., -alkyl-C(O)—OR, where R is an optionally substituted C₁₋₂₀, C₁₋₁₀, or C₁₋₆ alkyl group). Exemplary unsubstituted alkoxycarbonylalkyl include from 3 to 41 carbons (e.g., from 3 to 10, from 3 to 13, from 3 to 17, from 3 to 21, or from 3 to 31 carbons, such as C₁₋₆ alkoxycarbonyl-C₁₋₆ alkyl, C₁₋₁₀ alkoxycarbonyl-C₁₋₁₀ alkyl, or C₁₋₂₀ alkoxycarbonyl-C₁₋₂₀ alkyl). In some embodiments, each alkyl and alkoxy group is further independently substituted with 1, 2, 3, or 4 substituents as described herein (e.g., a hydroxy group).

[0772] The term “alkyl,” as used herein, is inclusive of both straight chain and branched chain saturated groups from 1 to 20 carbons (e.g., from 1 to 10 or from 1 to 6), unless otherwise specified. Alkyl groups are exemplified by methyl, ethyl, n- and iso-propyl, n-, sec-, iso- and tert-butyl, neopentyl, and the like, and may be optionally substituted with one, two, three, or, in the case of alkyl groups of two carbons or more, four substituents independently selected from the group consisting of: (1) C₁₋₆ alkoxy; (2) C₁₋₆ alkylsulfinyl; (3) amino, as defined herein (e.g., unsubstituted amino (i.e., —NH₂) or a substituted amino (i.e., —N(R^{N1})₂, where R^{N1} is as defined for amino); (4) C₆₋₁₀ aryl-C₁₋₆ alkoxy; (5) azido; (6) halo; (7) (C₂₋₉ heterocyclyl)oxy; (8) hydroxy; (9) nitro; (10) oxo (e.g., carboxyaldehyde or acyl); (11) C₁₋₇ spirocyclyl; (12) thioalkoxy; (13) thiol; (14) —CO₂R^{A′}, where R^{A′} is selected from the group consisting of (a) C₁₋₂₀ alkyl (e.g., C₁₋₆ alkyl), (b) C₂₋₂₀ alkenyl (e.g., C₂₋₆ alkenyl), (c) C₆₋₁₀ aryl, (d) hydrogen, (e) C₁₋₆ alk-C₆₋₁₀ aryl, (f) amino-C₁₋₂₀ alkyl, (g) polyethylene glycol of —(CH₂)ₛ₂(0CH₂CH₂)ₛ₁(CH₂)ₛ₃OR′, wherein s1 is an integer from 1 to 10 (e.g., from 1 to 6 or from 1 to 4), each of s2 and s3, independently, is an integer from 0 to 10 (e.g., from 0 to 4, from 0 to 6, from 1 to 4, from 1 to 6, or from 1 to 10), and R′ is H or C₁₋₂₀ alkyl, and (h) amino-polyethylene glycol of —NR^{N1}(CH₂)ₛ₂(CH₂CH₂O)ₛ₁(CH₂)ₛ₃NR^{N1}, wherein s1 is an integer from 1 to 10 (e.g., from 1 to 6 or from 1 to 4), each of s2 and s3, independently, is an integer from 0 to 10 (e.g., from 0 to 4, from 0 to 6, from 1 to 4, from 1 to 6, or from 1 to 10), and each R^{N1} is, independently, hydrogen or optionally substituted C₁₋₆ alkyl; (15) —C(O)NR^{B′}R^{C′}, where each of R^{B′} and R^{C′} is, independently, selected from the group consisting of (a) hydrogen, (b) C₁₋₆ alkyl, (c) C₆₋₁₀ aryl, and (d) C₁₋₆ alk-C₆₋₁₀ aryl; (16) —SO₂R^{D′}, where R^{D′} is selected from the group consisting of (a) C₁₋₆ alkyl, (b) C₆₋₁₀ aryl, (c) C₁₋₆ alk-C₆₋₁₀ aryl, and (d) hydroxy; (17) —SO₂NR^{E′}R^{F′}, where each of R^{E′} and R^{F′} is, independently, selected from the group consisting of (a) hydrogen, (b) C₁₋₆ alkyl, (c) C₆₋₁₀ aryl and (d) C₁₋₆ alk-C₆₋₁₀ aryl; (18) —C(O)R^{G′}, where R^{G′} is selected from the group consisting of (a) C₁₋₂₀ alkyl (e.g., C₁₋₆ alkyl), (b) C₂₋₂₀ alkenyl (e.g., C₂₋₆ alkenyl), (c) C₆₋₁₀ aryl, (d) hydrogen, (e) C₁₋₆ alk-C₆₋₁₀ aryl, (f) amino-C₁₋₂₀ alkyl, (g) polyethylene glycol of —(CH₂)ₛ₂(OCH₂CH₂)ₛ₁(CH₂)ₛ₃OR′, wherein s1 is an integer from 1 to 10 (e.g., from 1 to 6 or from 1 to 4), each of s2 and s3, independently, is an integer from 0 to 10 (e.g., from 0 to 4, from 0 to 6, from 1 to 4, from 1 to 6, or from 1 to 10), and R′ is H or C₁₋₂₀ alkyl, and (h) amino-polyethylene glycol of —NR^{N1}(CH₂)ₛ₂(CH₂CH₂O)ₛ₁(CH₂)ₛ₃NR^{N1}, wherein s1 is an integer from 1 to 10 (e.g., from 1 to 6 or from 1 to 4), each of s2 and s3, independently, is an integer from 0 to 10 (e.g., from 0 to 4, from 0 to 6, from 1 to 4, from 1 to 6, or from 1 to 10), and each R^{N1} is, independently, hydrogen or optionally substituted C₁₋₆ alkyl; (19) —NR^{H′}C(O)R^{I′}, wherein R^{I′} is selected from the group consisting of (a1) hydrogen and (b1) C₁₋₆ alkyl, and R^{E} is selected from the group consisting of (a2) C₁₋₂₀ alkyl (e.g., C₁₋₆ alkyl), (b2) C₂₋₂₀ alkenyl (e.g., C₂₋₆ alkenyl), (c2) C₆₋₁₀ aryl, (d2) hydrogen, (e2) C₁₋₆ alk-C₆₋₁₀ aryl, (f2) amino-C₁₋₂₀ alkyl, (g2) polyethylene glycol of —(CH₂)ₛ₂(OCH₂CH₂)ₛ₁(CH₂)ₛ₃OR′, wherein s1 is an integer from 1 to 10 (e.g., from 1 to 6 or from 1 to 4), each of s2 and s3, independently, is an integer from 0 to 10 (e.g., from 0 to 4, from 0 to 6, from 1 to 4, from 1 to 6, or from 1 to 10), and R′ is H or C₁₋₂₀ alkyl, and (h2) amino-polyethylene glycol of —NR^{N1}(CH₂)ₛ₂(CH₂CH₂O)ₛ₁(CH₂)ₛ₃NR^{N1}, wherein s1 is an integer from 1 to 10 (e.g., from 1 to 6 or from 1 to 4), each of s2 and s3, independently, is an integer from 0 to 10 (e.g., from 0 to 4, from 0 to 6, from 1 to 4, from 1 to 6, or from 1 to 10), and each R^{N1} is, independently, hydrogen or optionally substituted C₁₋₆ alkyl; (20) —NR^{J′}C(O)OR^{K′}, wherein R^{J′} is selected from the group consisting of (a1) hydrogen and (b1) C₁₋₆ alkyl, and R^{K′} is selected from the group consisting of (a2) C₁₋₂₀ alkyl (e.g., C₁₋₆ alkyl), (b2) C₂₋₂₀ alkenyl (e.g., C₂₋₆ alkenyl), (c2) C₆₋₁₀ aryl, (d2) hydrogen, (e2) C₁₋₆ alk-C₆₋₁₀ aryl, (f2) amino-C₁₋₂₀ alkyl, (g2) polyethylene glycol of —(CH₂)ₛ₂(OCH₂CH₂)ₛ₁(CH₂)ₛ₃OR′, wherein s1 is an integer from 1 to 10 (e.g., from 1 to 6 or from 1 to 4), each of s2 and s3, independently, is an integer from 0 to 10 (e.g., from 0 to 4, from 0 to 6, from 1 to 4, from 1 to 6, or from 1 to 10), and R′ is H or C₁₋₂₀ alkyl, and (h2) amino-polyethylene glycol of —NR^{Ni}(CH₂)ₛ₂(CH₂CH₂O)ₛ₁(CH₂)ₛ₃NR^{N1}, wherein s1 is an integer from 1 to 10 (e.g., from 1 to 6 or from 1 to 4), each of s2 and s3, independently, is an integer from 0 to 10 (e.g., from 0 to 4, from 0 to 6, from 1 to 4, from 1 to 6, or from 1 to 10), and each R^{N1} is, independently, hydrogen or optionally substituted C₁₋₆ alkyl; and (21) amidine. In some embodiments, each of these groups can be further substituted as described herein. For example, the alkylene group of a C₁-alkaryl can be further substituted with an oxo group to afford the respective aryloyl substituent.

[0773] The term “alkylene” and the prefix “alk-,” as used herein, represent a saturated divalent hydrocarbon group derived from a straight or branched chain saturated hydrocarbon by the removal of two hydrogen atoms, and is exemplified by methylene, ethylene, isopropylene, and the like. The term “C_{x-y} alkylene” and the prefix “C_{x-y} alk-” represent alkylene groups having between x and y carbons. Exemplary values for x are 1, 2, 3, 4, 5, and 6, and exemplary values for y are 2, 3, 4, 5, 6, 7, 8, 9, 10, 12, 14, 16, 18, or 20 (e.g., C₁₋₆, C₁₋₁₀, C₂₋₂₀, C₂₋₆, C₂₋₁₀ or C₂₋₂₀ alkylene). In some embodiments, the alkylene can be further substituted with 1, 2, 3, or 4 substituent groups as defined herein for an alkyl group.

[0774] The term “alkylsulfinyl,” as used herein, represents an alkyl group attached to the parent molecular group through an —S(O)— group. Exemplary unsubstituted alkylsulfinyl groups are from 1 to 6, from 1 to 10, or from 1 to 20 carbons. In some embodiments, the alkyl group can be further substituted with 1, 2, 3, or 4 substituent groups as defined herein.

[0775] The term “alkylsulfinylalkyl,” as used herein, represents an alkyl group, as defined herein, substituted by an alkylsulfinyl group. Exemplary unsubstituted alkylsulfinylalkyl groups are from 2 to 12, from 2 to 20, or from 2 to 40 carbons. In some embodiments, each alkyl group can be further substituted with 1, 2, 3, or 4 substituent groups as defined herein.

[0776] The term “alkynyl,” as used herein, represents monovalent straight or branched chain groups from 2 to 20 carbon atoms (e.g., from 2 to 4, from 2 to 6, or from 2 to 10 carbons) containing a carbon-carbon triple bond and is exemplified by ethynyl, 1-propynyl, and the like. Alkynyl groups may be optionally substituted with 1, 2, 3, or 4 substituent groups that are selected, independently, from aryl, cycloalkyl, or heterocyclyl (e.g., heteroaryl), as defined herein, or any of the exemplary alkyl substituent groups described herein.

[0777] The term “alkynyloxy” represents a chemical substituent of formula —OR, where R is a C₂₋₂₀ alkynyl group (e.g., C₂₋₆ or C₂₋₁₀ alkynyl), unless otherwise specified. Exemplary alkynyloxy groups include ethynyloxy, propynyloxy, and the like. In some embodiments, the alkynyl group can be further substituted with 1, 2, 3, or 4 substituent groups as defined herein (e.g., a hydroxy group).

[0778] The term “amidine,” as used herein, represents a —C(═NH)NH₂ group.

[0779] The term “amino,” as used herein, represents —N(R^{N1})₂, wherein each R^{N1} is, independently, H, OH, NO₂, N(R^{N2})₂, SO₂OR^{N2}, SO₂R^{N2}, SOR^{N2}, an N-protecting group, alkyl, alkenyl, alkynyl, alkoxy, aryl, alkaryl, cycloalkyl, alkcycloalkyl, carboxyalkyl, sulfoalkyl, heterocyclyl (e.g., heteroaryl), or alkheterocyclyl (e.g., alkheteroaryl), wherein each of these recited R^{N1} groups can be optionally substituted, as defined herein for each group; or two R^{N1} combine to form a heterocyclyl or an N-protecting group, and wherein each R^{N2} is, independently, H, alkyl, or aryl. The amino groups of the invention can be an unsubstituted amino (i.e., —NH₂) or a substituted amino (i.e., —N(R^{N1})₂) In a preferred embodiment, amino is —NH₂ or —NHR^{N1}, wherein R^{N1} is, independently, OH, NO₂, NH₂, NR^{N2}₂, SO₂R^{N2}, SOR^{N2}, alkyl, carboxyalkyl, sulfoalkyl, or aryl, and each R^{N2} can be H, C₁₋₂₀ alkyl (e.g., C₁₋₆ alkyl), or C₆₋₁₀ aryl.

[0780] The term “amino acid,” as described herein, refers to a molecule having a side chain, an amino group, and an acid group (e.g., a carboxy group of —CO₂H or a sulfo group of —SO₃H), wherein the amino acid is attached to the parent molecular group by the side chain, amino group, or acid group (e.g., the side chain). In some embodiments, the amino acid is attached to the parent molecular group by a carbonyl group, where the side chain or amino group is attached to the carbonyl group. Exemplary side chains include an optionally substituted alkyl, aryl, heterocyclyl, alkaryl, alkheterocyclyl, aminoalkyl, carbamoylalkyl, and carboxyalkyl. Exemplary amino acids include alanine, arginine, asparagine, aspartic acid, cysteine, glutamic acid, glutamine, glycine, histidine, hydroxynorvaline, isoleucine, leucine, lysine, methionine, norvaline, ornithine, phenylalanine, proline, pyrrolysine, selenocysteine, serine, taurine, threonine, tryptophan, tyrosine, and valine. Amino acid groups may be optionally substituted with one, two, three, or, in the case of amino acid groups of two carbons or more, four substituents independently selected from the group consisting of: (1) C₁₋₆ alkoxy; (2) C₁₋₆ alkylsulfinyl; (3) amino, as defined herein (e.g., unsubstituted amino (i.e., —NH₂) or a substituted amino (i.e., —N(R^{N1})₂, where R^{N1} is as defined for amino); (4) C₆₋₁₀ aryl-C₁₋₆ alkoxy; (5) azido; (6) halo; (7) (C₂₋₉ heterocyclyl)oxy; (8) hydroxy; (9) nitro; (10) oxo (e.g., carboxyaldehyde or acyl); (11) C₁₋₇ spirocyclyl; (12) thioalkoxy; (13) thiol; (14) —CO₂R^{A′}, where R^{A′} is selected from the group consisting of (a) C₁₋₂₀ alkyl (e.g., C₁₋₆ alkyl), (b) C₂₋₂₀ alkenyl (e.g., C₂₋₆ alkenyl), (c) C₆₋₁₀ aryl, (d) hydrogen, (e) C₁₋₆ alk-C₆₋₁₀ aryl, (f) amino-C₁₋₂₀ alkyl, (g) polyethylene glycol of —(CH₂)ₛ₂(OCH₂CH₂)ₛ₁(CH₂)ₛ₃OR′, wherein s1 is an integer from 1 to 10 (e.g., from 1 to 6 or from 1 to 4), each of s2 and s3, independently, is an integer from 0 to 10 (e.g., from 0 to 4, from 0 to 6, from 1 to 4, from 1 to 6, or from 1 to 10), and R′ is H or C₁₋₂₀ alkyl, and (h) amino-polyethylene glycol of —NR^{N1}(CH₂)ₛ₂(CH₂CH₂O)ₛᵢ(CH₂)ₛ₃NR^{N1}, wherein s1 is an integer from 1 to 10 (e.g., from 1 to 6 or from 1 to 4), each of s2 and s3, independently, is an integer from 0 to 10 (e.g., from 0 to 4, from 0 to 6, from 1 to 4, from 1 to 6, or from 1 to 10), and each R^{N1} is, independently, hydrogen or optionally substituted C₁₋₆ alkyl; (15) —C(O)NR^{B′}R^{C′}, where each of R^{B′} and R^{C′} is, independently, selected from the group consisting of (a) hydrogen, (b) C₁₋₆ alkyl, (c) C₆₋₁₀ aryl, and (d) C₁₋₆ alk-C₆₋₁₀ aryl; (16) —SO₂R^{D′}, where R^{D′} is selected from the group consisting of (a) C₁₋₆ alkyl, (b) C₆₋₁₀ aryl, (c) C₁₋₆ alk-C₆₋₁₀ aryl, and (d) hydroxy; (17) —SO₂NR^{E′}R^{F′}, where each of R^{E′} and R^{F′} is, independently, selected from the group consisting of (a) hydrogen, (b) C₁₋₆ alkyl, (c) C₆₋₁₀ aryl and (d) C₁₋₆ alk-C₆₋₁₀ aryl; (18) —C(O)R^{G′}, where R^{G′} is selected from the group consisting of (a) C₁₋₂₀ alkyl (e.g., C₁₋₆ alkyl), (b) C₂₋₂₀ alkenyl (e.g., C₂₋₆ alkenyl), (c) C₆₋₁₀ aryl, (d) hydrogen, (e) C₁₋₆ alk-C₆₋₁₀ aryl, (f) amino-C₁₋₂₀ alkyl, (g) polyethylene glycol of —(CH₂)ₛ₂(OCH₂CH₂)ₛ₁(CH₂)ₛ₃OR′, wherein s1 is an integer from ¹ to 10 (e.g., from 1 to 6 or from 1 to 4), each of s2 and s3, independently, is an integer from 0 to 10 (e.g., from 0 to 4, from 0 to 6, from 1 to 4, from 1 to 6, or from 1 to 10), and R′ is H or C₁₋₂₀ alkyl, and (h) amino-polyethylene glycol of —NR^{N1}(CH₂)ₛ₂(CH₂CH₂O)ₛ₁(CH₂)ₛ₃NR^{N1}, wherein s1 is an integer from 1 to 10 (e.g., from 1 to 6 or from 1 to 4), each of s2 and s3, independently, is an integer from 0 to 10 (e.g., from 0 to 4, from 0 to 6, from 1 to 4, from 1 to 6, or from 1 to 10), and each R^{N1} is, independently, hydrogen or optionally substituted C₁₋₆ alkyl; (19) —NR^{H′}C(O)R^{I′}, wherein R^{H′} is selected from the group consisting of (al) hydrogen and (b1) C₁₋₆ alkyl, and R^{I′} is selected from the group consisting of (a2) C₁₋₂₀ alkyl (e.g., C₁₋₆ alkyl), (b2) C₂₋₂₀ alkenyl (e.g., C₂₋₆ alkenyl), (c2) C₆₋₁₀ aryl, (d2) hydrogen, (e2) C₁₋₆ alk-C₆₋₁₀ aryl, (f2) amino-C₁₋₂₀ alkyl, (g2) polyethylene glycol of —(CH₂)ₛ₂(OCH₂CH₂)ₛ₁(CH₂)ₛ₃OR′, wherein s1 is an integer from 1 to 10 (e.g., from 1 to 6 or from 1 to 4), each of s2 and s3, independently, is an integer from 0 to 10 (e.g., from 0 to 4, from 0 to 6, from 1 to 4, from 1 to 6, or from 1 to 10), and R′ is H or C₁₋₂₀ alkyl, and (h2) amino-polyethylene glycol of —NR^{N1}(CH₂)ₛ₂(CH₂CH₂O)ₛ₁(CH₂)ₛ₃NR^{N1}, wherein s1 is an integer from 1 to 10 (e.g., from 1 to 6 or from 1 to 4), each of s2 and s3, independently, is an integer from 0 to 10 (e.g., from 0 to 4, from 0 to 6, from 1 to 4, from 1 to 6, or from 1 to 10), and each R^{N1} is, independently, hydrogen or optionally substituted C₁₋₆ alkyl; (20) —NR^{J′}C(O)OR^{K′}, wherein R^{J′} is selected from the group consisting of (a1) hydrogen and (b1) C₁₋₆ alkyl, and R^{K′} is selected from the group consisting of (a2) C₁₋₂₀ alkyl (e.g., C₁₋₆ alkyl), (b2) C₂₋₂₀ alkenyl (e.g., C₂₋₆ alkenyl), (c2) C₆₋₁₀ aryl, (d2) hydrogen, (e2) C₁₋₆ alk-C₆₋₁₀ aryl, (f2) amino-C₁₋₂₀ alkyl, (g2) polyethylene glycol of —(CH₂)ₛ₂(OCH₂CH₂)ₛ₁(CH₂)ₛ₃OR′, wherein s1 is an integer from 1 to 10 (e.g., from 1 to 6 or from 1 to 4), each of s2 and s3, independently, is an integer from 0 to 10 (e.g., from 0 to 4, from 0 to 6, from 1 to 4, from 1 to 6, or from 1 to 10), and R′ is H or C₁₋₂₀ alkyl, and (h2) amino-polyethylene glycol of —NR^{N1}(CH₂)ₛ₂(CH₂CH₂O)ₛ₁(CH₂)ₛ₃NR^{N1}, wherein s1 is an integer from 1 to 10 (e.g., from 1 to 6 or from 1 to 4), each of s2 and s3, independently, is an integer from 0 to 10 (e.g., from 0 to 4, from 0 to 6, from 1 to 4, from 1 to 6, or from 1 to 10), and each R^{N1} is, independently, hydrogen or optionally substituted C₁₋₆ alkyl; and (21) amidine. In some embodiments, each of these groups can be further substituted as described herein.

[0781] The term “aminoalkoxy,” as used herein, represents an alkoxy group, as defined herein, substituted by an amino group, as defined herein. The alkyl and amino each can be further substituted with 1, 2, 3, or 4 substituent groups as described herein for the respective group (e.g., CO₂R^{A′}, where R^{A′} is selected from the group consisting of (a) C₁₋₆ alkyl, (b) C₆₋₁₀ aryl, (c) hydrogen, and (d) C₁₋₆ alk-C₆₋₁₀ aryl, e.g., carboxy).

[0782] The term “aminoalkyl,” as used herein, represents an alkyl group, as defined herein, substituted by an amino group, as defined herein. The alkyl and amino each can be further substituted with 1, 2, 3, or 4 substituent groups as described herein for the respective group (e.g., CO₂R^{A′}, where R^{A′} is selected from the group consisting of (a) C₁₋₆ alkyl, (b) C₆₋₁₀ aryl, (c) hydrogen, and (d) C₁₋₆ alk-C₆₋₁₀ aryl, e.g., carboxy).

[0783] The term “aryl,” as used herein, represents a mono-, bicyclic, or multicyclic carbocyclic ring system having one or two aromatic rings and is exemplified by phenyl, naphthyl, 1,2-dihydronaphthyl, 1,2,3,4-tetrahydronaphthyl, anthracenyl, phenanthrenyl, fluorenyl, indanyl, indenyl, and the like, and may be optionally substituted with 1, 2, 3, 4, or 5 substituents independently selected from the group consisting of: (1) C₁₋₇ acyl (e.g., carboxyaldehyde); (2) C₁₋₂₀ alkyl (e.g., C₁₋₆ alkyl, C₁₋₆ alkoxy-C₁₋₆ alkyl, C₁₋₆ alkylsulfinyl-C₁₋₆ alkyl, amino-C₁₋₆ alkyl, azido-C₁₋₆ alkyl, (carboxyaldehyde)-C₁₋₆ alkyl, halo-C₁₋₆ alkyl (e.g., perfluoroalkyl), hydroxy-C₁₋₆ alkyl, nitro-C₁₋₆ alkyl, or C₁₋₆ thioalkoxy-C₁₋₆ alkyl); (3) C₁₋₂₀ alkoxy (e.g., C₁₋₆ alkoxy, such as perfluoroalkoxy); (4) C₁₋₆ alkylsulfinyl; (5) C₆₋₁₀ aryl; (6) amino; (7) C₁₋₆ alk-C₆₋₁₀ aryl; (8) azido; (9) C₃₋₈ cycloalkyl; (10) C₁₋₆ alk-C₃₋₈ cycloalkyl; (11) halo; (12) C₁₋₁₂ heterocyclyl (e.g., C₁₋₁₂ heteroaryl); (13) (C₁₋₁₂ heterocyclyl)oxy; (14) hydroxy; (15) nitro; (16) C₁₋₂₀ thioalkoxy (e.g., C₁₋₆ thioalkoxy); (17) —(CH₂)_{q}CO₂R^{A′}, where q is an integer from zero to four, and R^{A′} is selected from the group consisting of (a) C₁₋₆ alkyl, (b) C₆₋₁₀ aryl, (c) hydrogen, and (d) C₁₋₆ alk-C₆₋₁₀ aryl; (18) —(CH₂)_{q}CONR^{B′}R^{C′}, where q is an integer from zero to four and where R^{B′} and R^{C′} are independently selected from the group consisting of (a) hydrogen, (b) C₁₋₆ alkyl, (c) C₆₋₁₀ aryl, and (d) C₁₋₆ alk-C₆₋₁₀ aryl; (19) —(CH₂)_{q}SO₂R^{D′}, where q is an integer from zero to four and where R^{D′} is selected from the group consisting of (a) alkyl, (b) C₆₋₁₀ aryl, and (c) alk-C₆₋₁₀ aryl; (20) —(CH₂)_{q}SO₂NR^{E′}R^{F′}, where q is an integer from zero to four and where each of R^{E′} and R^{F′} is, independently, selected from the group consisting of (a) hydrogen, (b) C₁₋₆ alkyl, (c) C₆₋₁₀ aryl, and (d) C₁₋₆ alk-C₆₋₁₀ aryl; (21) thiol; (22) C₆₋₁₀ aryloxy; (23) C₃₋₈ cycloalkoxy; (24) C₆₋₁₀ aryl-C₁₋₆ alkoxy; (25) C₁₋₆ alk-C₁₋₁₂ heterocyclyl (e.g., C₁₋₆ alk-C₁₋₁₂ heteroaryl); (26) C₂₋₂₀ alkenyl; and (27) C₂₋₂₀ alkynyl. In some embodiments, each of these groups can be further substituted as described herein. For example, the alkylene group of a C₁-alkaryl or a C₁-alkheterocyclyl can be further substituted with an oxo group to afford the respective aryloyl and (heterocyclyl)oyl substituent group.

[0784] The term “arylalkoxy,” as used herein, represents an alkaryl group, as defined herein, attached to the parent molecular group through an oxygen atom. Exemplary unsubstituted alkoxyalkyl groups include from 7 to 30 carbons (e.g., from 7 to 16 or from 7 to 20 carbons, such as C₆₋₁₀ aryl-C₁₋₆ alkoxy, C₆₋₁₀ aryl-C₁₋₁₀ alkoxy, or C₆₋₁₀ aryl-C₁₋₂₀ alkoxy). In some embodiments, the arylalkoxy group can be substituted with 1, 2, 3, or 4 substituents as defined herein

[0785] The term “aryloxy” represents a chemical substituent of formula —OR′, where R′ is an aryl group of 6 to 18 carbons, unless otherwise specified. In some embodiments, the aryl group can be substituted with 1, 2, 3, or 4 substituents as defined herein.

[0786] The term “aryloyl,” as used herein, represents an aryl group, as defined herein, that is attached to the parent molecular group through a carbonyl group. Exemplary unsubstituted aryloyl groups are of 7 to 11 carbons. In some embodiments, the aryl group can be substituted with 1, 2, 3, or 4 substituents as defined herein.

[0787] The term “azido” represents an —N₃ group, which can also be represented as —N═N═N.

[0788] The term “bicyclic,” as used herein, refer to a structure having two rings, which may be aromatic or non-aromatic. Bicyclic structures include spirocyclyl groups, as defined herein, and two rings that share one or more bridges, where such bridges can include one atom or a chain including two, three, or more atoms. Exemplary bicyclic groups include a bicyclic carbocyclyl group, where the first and second rings are carbocyclyl groups, as defined herein; a bicyclic aryl groups, where the first and second rings are aryl groups, as defined herein; bicyclic heterocyclyl groups, where the first ring is a heterocyclyl group and the second ring is a carbocyclyl (e.g., aryl) or heterocyclyl (e.g., heteroaryl) group; and bicyclic heteroaryl groups, where the first ring is a heteroaryl group and the second ring is a carbocyclyl (e.g., aryl) or heterocyclyl (e.g., heteroaryl) group. In some embodiments, the bicyclic group can be substituted with 1, 2, 3, or 4 substituents as defined herein for cycloalkyl, heterocyclyl, and aryl groups.

[0789] The terms “carbocyclic” and “carbocyclyl,” as used herein, refer to an optionally substituted C₃₋₁₂ monocyclic, bicyclic, or tricyclic structure in which the rings, which may be aromatic or non-aromatic, are formed by carbon atoms. Carbocyclic structures include cycloalkyl, cycloalkenyl, and aryl groups.

[0790] The term “carbamoyl,” as used herein, represents —C(O)—N(R^{N1})₂, where the meaning of each R^{N1} is found in the definition of “amino” provided herein.

[0791] The term “carbamoylalkyl,” as used herein, represents an alkyl group, as defined herein, substituted by a carbamoyl group, as defined herein. The alkyl group can be further substituted with 1, 2, 3, or 4 substituent groups as described herein.

[0792] The term “carbamyl,” as used herein, refers to a carbamate group having the structure —NR^{N1}C(═O)OR or —OC(═O)N(R^{N1})₂, where the meaning of each R^{N1} is found in the definition of “amino” provided herein, and R is alkyl, cycloalkyl, alkcycloalkyl, aryl, alkaryl, heterocyclyl (e.g., heteroaryl), or alkheterocyclyl (e.g., alkheteroaryl), as defined herein.

[0793] The term “carbonyl,” as used herein, represents a C(O) group, which can also be represented as C═O.

[0794] The term “carboxyaldehyde” represents an acyl group having the structure —CHO.

[0795] The term “carboxy,” as used herein, means —CO₂H.

[0796] The term “carboxyalkoxy,” as used herein, represents an alkoxy group, as defined herein, substituted by a carboxy group, as defined herein. The alkoxy group can be further substituted with 1, 2, 3, or 4 substituent groups as described herein for the alkyl group.

[0797] The term “carboxyalkyl,” as used herein, represents an alkyl group, as defined herein, substituted by a carboxy group, as defined herein. The alkyl group can be further substituted with 1, 2, 3, or 4 substituent groups as described herein.

[0798] The term “cyano,” as used herein, represents an —CN group.

[0799] The term “cycloalkoxy” represents a chemical substituent of formula —OR, where R is a C₃₋₈ cycloalkyl group, as defined herein, unless otherwise specified. The cycloalkyl group can be further substituted with 1, 2, 3, or 4 substituent groups as described herein. Exemplary unsubstituted cycloalkoxy groups are from 3 to 8 carbons.

[0800] The term “cycloalkyl,” as used herein represents a monovalent saturated or unsaturated non-aromatic cyclic hydrocarbon group from three to eight carbons, unless otherwise specified, and is exemplified by cyclopropyl, cyclobutyl, cyclopentyl, cyclohexyl, cycloheptyl, bicyclo[2.2.1]heptyl, and the like. When the cycloalkyl group includes one carbon-carbon double bond, the cycloalkyl group can be referred to as a “cycloalkenyl” group. Exemplary cycloalkenyl groups include cyclopentenyl, cyclohexenyl, and the like. The cycloalkyl groups of this invention can be optionally substituted with: (1) C₁₋₇ acyl (e.g., carboxyaldehyde); (2) C₁₋₂₀ alkyl (e.g., C₁₋₆ alkyl, C₁₋₆ alkoxy-C₁₋₆ alkyl, C₁₋₆ alkylsulfinyl-C₁₋₆ alkyl, amino-C₁₋₆ alkyl, azido-C₁₋₆ alkyl, (carboxyaldehyde)-C₁₋₆ alkyl, halo-C₁₋₆ alkyl (e.g., perfluoroalkyl), hydroxy-C₁₋₆ alkyl, nitro-C₁₋₆ alkyl, or C₁₋₆thioalkoxy-C₁₋₆ alkyl); (3) C₁₋₂₀ alkoxy (e.g., C₁₋₆ alkoxy, such as perfluoroalkoxy); (4) C₁₋₆ alkylsulfinyl; (5) C₆₋₁₀ aryl; (6) amino; (7) C₁₋₆ alk-C₆₋₁₀ aryl; (8) azido; (9) C₃₋₈ cycloalkyl; (10) C₁₋₆ alk-C₃₋₈ cycloalkyl; (11) halo; (12) C₁₋₁₂ heterocyclyl (e.g., C₁₋₁₂ heteroaryl); (13) (C₁₋₁₂ heterocyclyl)oxy; (14) hydroxy; (15) nitro; (16) C₁₋₂₀ thioalkoxy (e.g., C₁₋₆ thioalkoxy); (17) —(CH₂)_{q}CO₂R^{A′}, where q is an integer from zero to four, and R^{A′} is selected from the group consisting of (a) C₁₋₆ alkyl, (b) C₆₋₁₀ aryl, (c) hydrogen, and (d) C₁₋₆ alk-C₆₋₁₀ aryl; (18) —(CH₂)_{q}CONR^{B′}R^{C′}, where q is an integer from zero to four and where R^{B′} and R^{C′} are independently selected from the group consisting of (a) hydrogen, (b) C₆₋₁₀ alkyl, (c) C₆₋₁₀ aryl, and (d) C₁₋₆ alk-C₆₋₁₀ aryl; (19) —(CH₂)_{q}SO₂R^{D′}, where q is an integer from zero to four and where R^{D′} is selected from the group consisting of (a) C₆₋₁₀ alkyl, (b) C₆₋₁₀ aryl, and (c) C₁₋₆ alk-C₆₋₁₀ aryl; (20) —(CH₂)_{q}SO₂NR^{E′}R^{F′}, where q is an integer from zero to four and where each of R^{E′} and R^{F′} is, independently, selected from the group consisting of (a) hydrogen, (b) C₆₋₁₀ alkyl, (c) C₆₋₁₀ aryl, and (d) C₁₋₆ alk-C₆₋₁₀ aryl; (21) thiol; (22) C₆₋₁₀ aryloxy; (23) C₃₋₈ cycloalkoxy; (24) C₆₋₁₀ aryl-C₁₋₆ alkoxy; (25) C₁₋₆ alk-C₁₋₁₂ heterocyclyl (e.g., C₁₋₆ alk-C₁₋₁₂ heteroaryl); (26) oxo; (27) C₂₋₂₀ alkenyl; and (28) C₂₋₂₀ alkynyl. In some embodiments, each of these groups can be further substituted as described herein. For example, the alkylene group of a C₁-alkaryl or a C₁-alkheterocyclyl can be further substituted with an oxo group to afford the respective aryloyl and (heterocyclyl)oyl substituent group.

[0801] The term “diasteromer” means stereoisomers that are not mirror images of one another and are non-superimposable.

[0802] The term “effective amount” of an agent, as used herein, is that amount sufficient to effect beneficial or desired results, for example, clinical results, and, as such, an “effective amount” depends upon the context in which it is being applied. For example, in the context of administering an agent that treats cancer, an effective amount of an agent is, for example, an amount sufficient to achieve treatment, as defined herein, of cancer, as compared to the response obtained without administration of the agent.

[0803] The term “enantiomer,” as used herein, means each individual optically active form of a compound of the invention, having an optical purity or enantiomeric excess (as determined by methods standard in the art) of at least 80% (i.e., at least 90% of one enantiomer and at most 10% of the other enantiomer), preferably at least 90% and more preferably at least 98%.

[0804] The term “halo,” as used herein, represents a halogen selected from bromine, chlorine, iodine, or fluorine.

[0805] The term “haloalkoxy,” as used herein, represents an alkoxy group, as defined herein, substituted by a halogen group (i.e., F, Cl, Br, or I). A haloalkoxy may be substituted with one, two, three, or, in the case of alkyl groups of two carbons or more, four halogens. Haloalkoxy groups include perfluoroalkoxys (e.g., —OCF₃), —OCHF₂, —OCH₂F, —OCCl₃, —OCH₂CH₂Br, —OCH₂CH(CH₂CH₂Br)CH₃, and —OCHICH₃. In some embodiments, the haloalkoxy group can be further substituted with 1, 2, 3, or 4 substituent groups as described herein for alkyl groups.

[0806] The term “haloalkyl,” as used herein, represents an alkyl group, as defined herein, substituted by a halogen group (i.e., F, Cl, Br, or I). A haloalkyl may be substituted with one, two, three, or, in the case of alkyl groups of two carbons or more, four halogens. Haloalkyl groups include perfluoroalkyls (e.g., —CF₃), —CHF₂, —CH₂F, —CCl₃, —CH₂CH₂Br, —CH₂CH(CH₂CH₂Br)CH₃, and —CHICH₃. In some embodiments, the haloalkyl group can be further substituted with 1, 2, 3, or 4 substituent groups as described herein for alkyl groups.

[0807] The term “heteroalkylene,” as used herein, refers to an alkylene group, as defined herein, in which one or two of the constituent carbon atoms have each been replaced by nitrogen, oxygen, or sulfur. In some embodiments, the heteroalkylene group can be further substituted with 1, 2, 3, or 4 substituent groups as described herein for alkylene groups.

[0808] The term “heteroaryl,” as used herein, represents that subset of heterocyclyls, as defined herein, which are aromatic: i.e., they contain 4n+2 pi electrons within the mono- or multicyclic ring system. Exemplary unsubstituted heteroaryl groups are of 1 to 12 (e.g., 1 to 11, 1 to 10, 1 to 9, 2 to 12, 2 to 11, 2 to 10, or 2 to 9) carbons. In some embodiment, the heteroaryl is substituted with 1, 2, 3, or 4 substituents groups as defined for a heterocyclyl group.

[0809] The term “heterocyclyl,” as used herein represents a 5-, 6- or 7-membered ring, unless otherwise specified, containing one, two, three, or four heteroatoms independently selected from the group consisting of nitrogen, oxygen, and sulfur. The 5-membered ring has zero to two double bonds, and the 6- and 7-membered rings have zero to three double bonds. Exemplary unsubstituted heterocyclyl groups are of 1 to 12 (e.g., 1 to 11, 1 to 10, 1 to 9, 2 to 12, 2 to 11, 2 to 10, or 2 to 9) carbons. The term “heterocyclyl” also represents a heterocyclic compound having a bridged multicyclic structure in which one or more carbons and/or heteroatoms bridges two non-adjacent members of a monocyclic ring, e.g., a quinuclidinyl group. The term “heterocyclyl” includes bicyclic, tricyclic, and tetracyclic groups in which any of the above heterocyclic rings is fused to one, two, or three carbocyclic rings, e.g., an aryl ring, a cyclohexane ring, a cyclohexene ring, a cyclopentane ring, a cyclopentene ring, or another monocyclic heterocyclic ring, such as indolyl, quinolyl, isoquinolyl, tetrahydroquinolyl, benzofuryl, benzothienyl and the like. Examples of fused heterocyclyls include tropanes and 1,2,3,5,8,8a-hexahydroindolizine. Heterocyclics include pyrrolyl, pyrrolinyl, pyrrolidinyl, pyrazolyl, pyrazolinyl, pyrazolidinyl, imidazolyl, imidazolinyl, imidazolidinyl, pyridyl, piperidinyl, homopiperidinyl, pyrazinyl, piperazinyl, pyrimidinyl, pyridazinyl, oxazolyl, oxazolidinyl, isoxazolyl, isoxazolidiniyl, morpholinyl, thiomorpholinyl, thiazolyl, thiazolidinyl, isothiazolyl, isothiazolidinyl, indolyl, indazolyl, quinolyl, isoquinolyl, quinoxalinyl, dihydroquinoxalinyl, quinazolinyl, cinnolinyl, phthalazinyl, benzimidazolyl, benzothiazolyl, benzoxazolyl, benzothiadiazolyl, furyl, thienyl, thiazolidinyl, isothiazolyl, triazolyl, tetrazolyl, oxadiazolyl (e.g., 1,2,3-oxadiazolyl), purinyl, thiadiazolyl (e.g., 1,2,3-thiadiazolyl), tetrahydrofuranyl, dihydrofuranyl, tetrahydrothienyl, dihydrothienyl, dihydroindolyl, dihydroquinolyl, tetrahydroquinolyl, tetrahydroisoquinolyl, dihydroisoquinolyl, pyranyl, dihydropyranyl, dithiazolyl, benzofuranyl, isobenzofuranyl, benzothienyl, and the like, including dihydro and tetrahydro forms thereof, where one or more double bonds are reduced and replaced with hydrogens. Still other exemplary heterocyclyls include: 2,3,4,5-tetrahydro-2-oxo-oxazolyl; 2,3-dihydro-2-oxo-1H-imidazolyl; 2,3,4,5-tetrahydro-5-oxo-1H-pyrazolyl (e.g., 2,3,4,5-tetrahydro-2-phenyl-5-oxo-1H-pyrazolyl); 2,3,4,5-tetrahydro-2,4-dioxo-1H-imidazolyl (e.g., 2,3,4,5-tetrahydro-2,4-dioxo-5-methyl-5-phenyl-1H-imidazolyl); 2,3-dihydro-2-thioxo-1,3,4-oxadiazolyl (e.g., 2,3-dihydro-2-thioxo-5-phenyl-1,3,4-oxadiazolyl); 4,5-dihydro-5-oxo-1H-triazolyl (e.g., 4,5-dihydro-3-methyl-4-amino 5-oxo-1H-triazolyl); 1,2,3,4-tetrahydro-2,4-dioxopyridinyl (e.g., 1,2,3,4-tetrahydro-2,4-dioxo-3,3-diethylpyridinyl); 2,6-dioxo-piperidinyl (e.g., 2,6-dioxo-3-ethyl-3-phenylpiperidinyl); 1,6-dihydro-6-oxopyridiminyl; 1,6-dihydro-4-oxopyrimidinyl (e.g., 2-(methylthio)-1,6-dihydro-4-oxo-5-methylpyrimidin-1-yl); 1,2,3,4-tetrahydro-2,4-dioxopyrimidinyl (e.g., 1,2,3,4-tetrahydro-2,4-dioxo-3-ethylpyrimidinyl); 1,6-dihydro-6-oxo-pyridazinyl (e.g., 1,6-dihydro-6-oxo-3-ethylpyridazinyl); 1,6-dihydro-6-oxo-1,2,4-triazinyl (e.g., 1,6-dihydro-5-isopropyl-6-oxo-1,2,4-triazinyl); 2,3-dihydro-2-oxo-1H-indolyl (e.g., 3,3-dimethyl-2,3-dihydro-2-oxo-1H-indolyl and 2,3-dihydro-2-oxo-3,3′-spiropropane-1H-indol-1-yl); 1,3-dihydro-1-oxo-2H-iso-indolyl; 1,3-dihydro-1,3-dioxo-2H-iso-indolyl; 1H-benzopyrazolyl (e.g., 1-(ethoxycarbonyl)-1H-benzopyrazolyl); 2,3-dihydro-2-oxo-1H-benzimidazolyl (e.g., 3-ethyl-2,3-dihydro-2-oxo-1H-benzimidazolyl); 2,3-dihydro-2-oxo-benzoxazolyl (e.g., 5-chloro-2,3-dihydro-2-oxo-benzoxazolyl); 2,3-dihydro-2-oxo-benzoxazolyl; 2-oxo-2H-benzopyranyl; 1,4-benzodioxanyl; 1,3-benzodioxanyl; 2,3-dihydro-3-oxo, 4H-1,3-benzothiazinyl; 3,4-dihydro-4-oxo-3H-quinazolinyl (e.g., 2-methyl-3,4-dihydro-4-oxo-3H-quinazolinyl); 1,2,3,4-tetrahydro-2,4-dioxo-3H-quinazolyl (e.g., 1-ethyl-1,2,3,4-tetrahydro-2,4-dioxo-3H-quinazolyl); 1,2,3,6-tetrahydro-2,6-dioxo-7H-purinyl (e.g., 1,2,3,6-tetrahydro-1,3-dimethyl-2,6-dioxo-7H-purinyl); 1,2,3,6-tetrahydro-2,6-dioxo-1H-purinyl (e.g., 1,2,3,6-tetrahydro-3,7-dimethyl-2,6-dioxo-1H-purinyl); 2-oxobenz[c,d]indolyl; 1,1-dioxo-2H-naphth[1,8-c, cl]isothiazolyl; and 1,8-naphthylenedicarboxamido. Additional heterocyclics include 3,3a,4,5,6,6a-hexahydro-pyrrolo[3,4-b]pyrrol-(2H)-yl, and 2,5-diazabicyclo[2.2.1]heptan-2-yl, homopiperazinyl (or diazepanyl), tetrahydropyranyl, dithiazolyl, benzofuranyl, benzothienyl, oxepanyl, thiepanyl, azocanyl, oxecanyl, and thiocanyl. Heterocyclic groups also include groups of the formula

[chemical structure]

where

[0810] E′ is selected from the group consisting of —N— and —CH—; F′ is selected from the group consisting of —N═CH—, —NH—CH₂—, —NH—C(O)—, —NH—, —CH═N—, —CH₂—NH—, —C(O)—NH—, —CH═CH—, —CH₂—, —CH₂CH₂—, —CH₂O—, —OCH₂—, —O—, and —S—; and G′ is selected from the group consisting of —CH— and —N—. Any of the heterocyclyl groups mentioned herein may be optionally substituted with one, two, three, four or five substituents independently selected from the group consisting of: (1) C₁₋₇ acyl (e.g., carboxyaldehyde); (2) C₁₋₂₀ alkyl (e.g., C₁₋₆ alkyl, C₁₋₆ alkoxy-C₁₋₆ alkyl, C₁₋₆ alkylsulfinyl-C₁₋₆ alkyl, amino-C₁₋₆ alkyl, azido-C₁₋₆ alkyl, (carboxyaldehyde)-C₁₋₆ alkyl, halo-C₁₋₆ alkyl (e.g., perfluoroalkyl), hydroxy-C₁₋₆ alkyl, nitro-C₁₋₆ alkyl, or C₁₋₆ thioalkoxy-C₁₋₆ alkyl); (3) C₁₋₂₀ alkoxy (e.g., C₁₋₆ alkoxy, such as perfluoroalkoxy); (4) C₁₋₆ alkylsulfinyl; (5) C₆₋₁₀ aryl; (6) amino; (7) C₁₋₆ alk-C₆₋₁₀ aryl; (8) azido; (9) C₃₋₈ cycloalkyl; (10) C₁₋₆ alk-C₃₋₈ cycloalkyl; (11) halo; (12) C₁₋₁₂ heterocyclyl (e.g., C₂₋₁₂ heteroaryl); (13) (C₁₋₁₂ heterocyclyl)oxy; (14) hydroxy; (15) nitro; (16) C₁₋₂₀ thioalkoxy (e.g., C₁₋₆ thioalkoxy); (17) —(CH₂)_{q}CO₂R^{A′}, where q is an integer from zero to four, and R^{A′} is selected from the group consisting of (a) C₁₋₆ alkyl, (b) C₆₋₁₀ aryl, (c) hydrogen, and (d) C₁₋₆ alk-C₆₋₁₀ aryl; (18) —(CH₂)_{q}CONR^{B′}R^{C′}, where q is an integer from zero to four and where R^{B′} and R^{C′} are independently selected from the group consisting of (a) hydrogen, (b) C₁₋₆ alkyl, (c) C₆₋₁₀ aryl, and (d) C₁₋₆ alk-C₆₋₁₀ aryl; (19) —(CH₂)_{q}SO₂R^{D′}, where q is an integer from zero to four and where R^{D′} is selected from the group consisting of (a) C₁₋₆ alkyl, (b) C₆₋₁₀ aryl, and (c) C₁₋₆ alk-C₆₋₁₀ aryl; (20) —(CH₂)_{q}SO₂NR^{E′}R^{F′}, where q is an integer from zero to four and where each of R^{E′} and R^{F′} is, independently, selected from the group consisting of (a) hydrogen, (b) C₁₋₆ alkyl, (c) C₆₋₁₀ aryl, and (d) C₁₋₆ alk-C₆₋₁₀ aryl; (21) thiol; (22) C₆₋₁₀ aryloxy; (23) C₃₋₈ cycloalkoxy; (24) arylalkoxy; (25) C₁₋₆ alk-C₁₋₁₂ heterocyclyl (e.g., C₁₋₆ alk-C₁₋₁₂ hetero aryl); (26) oxo; (27) (C₁₋₁₂ heterocyclyl)imino; (28) C₂₋₂₀ alkenyl; and (29) C₂₋₂₀ alkynyl. In some embodiments, each of these groups can be further substituted as described herein. For example, the alkylene group of a C₁-alkaryl or a C₁-alkheterocyclyl can be further substituted with an oxo group to afford the respective aryloyl and (heterocyclyl)oyl substituent group.

[0811] The term “(heterocyclyl)imino,” as used herein, represents a heterocyclyl group, as defined herein, attached to the parent molecular group through an imino group. In some embodiments, the heterocyclyl group can be substituted with 1, 2, 3, or 4 substituent groups as defined herein.

[0812] The term “(heterocyclyl)oxy,” as used herein, represents a heterocyclyl group, as defined herein, attached to the parent molecular group through an oxygen atom. In some embodiments, the heterocyclyl group can be substituted with 1, 2, 3, or 4 substituent groups as defined herein.

[0813] The term “(heterocyclyl)oyl,” as used herein, represents a heterocyclyl group, as defined herein, attached to the parent molecular group through a carbonyl group. In some embodiments, the heterocyclyl group can be substituted with 1, 2, 3, or 4 substituent groups as defined herein.

[0814] The term “hydrocarbon,” as used herein, represents a group consisting only of carbon and hydrogen atoms.

[0815] The term “hydroxy,” as used herein, represents an —OH group.

[0816] The term “hydroxyalkenyl,” as used herein, represents an alkenyl group, as defined herein, substituted by one to three hydroxy groups, with the proviso that no more than one hydroxy group may be attached to a single carbon atom of the alkyl group, and is exemplified by dihydroxypropenyl, hydroxyisopentenyl, and the like.

[0817] The term “hydroxyalkyl,” as used herein, represents an alkyl group, as defined herein, substituted by one to three hydroxy groups, with the proviso that no more than one hydroxy group may be attached to a single carbon atom of the alkyl group, and is exemplified by hydroxymethyl, dihydroxypropyl, and the like.

[0818] The term “isomer,” as used herein, means any tautomer, stereoisomer, enantiomer, or diastereomer of any compound of the invention. It is recognized that the compounds of the invention can have one or more chiral centers and/or double bonds and, therefore, exist as stereoisomers, such as double-bond isomers (i.e., geometric E/Z isomers) or diastereomers (e.g., enantiomers (i.e., (+) or (−)) or cis/trans isomers). According to the invention, the chemical structures depicted herein, and therefore the compounds of the invention, encompass all of the corresponding stereoisomers, that is, both the stereomerically pure form (e.g., geometrically pure, enantiomerically pure, or diastereomerically pure) and enantiomeric and stereoisomeric mixtures, e.g., racemates. Enantiomeric and stereoisomeric mixtures of compounds of the invention can typically be resolved into their component enantiomers or stereoisomers by well-known methods, such as chiral-phase gas chromatography, chiral-phase high performance liquid chromatography, crystallizing the compound as a chiral salt complex, or crystallizing the compound in a chiral solvent. Enantiomers and stereoisomers can also be obtained from stereomerically or enantiomerically pure intermediates, reagents, and catalysts by well-known asymmetric synthetic methods.

[0819] The term “N-protected amino,” as used herein, refers to an amino group, as defined herein, to which is attached one or two N-protecting groups, as defined herein.

[0820] The term “N-protecting group,” as used herein, represents those groups intended to protect an amino group against undesirable reactions during synthetic procedures. Commonly used N-protecting groups are disclosed in Greene, “Protective Groups in Organic Synthesis,” 3^{rd} Edition (John Wiley & Sons, New York, 1999), which is incorporated herein by reference. N-protecting groups include acyl, aryloyl, or carbamyl groups such as formyl, acetyl, propionyl, pivaloyl, t-butylacetyl, 2-chloroacetyl, 2-bromoacetyl, trifluoroacetyl, trichloroacetyl, phthalyl, o-nitrophenoxyacetyl, α-chlorobutyryl, benzoyl, 4-chlorobenzoyl, 4-bromobenzoyl, 4-nitrobenzoyl, and chiral auxiliaries such as protected or unprotected D, L or D, L-amino acids such as alanine, leucine, phenylalanine, and the like; sulfonyl-containing groups such as benzenesulfonyl, p-toluenesulfonyl, and the like; carbamate forming groups such as benzyloxycarbonyl, p-chlorobenzyloxycarbonyl, p-methoxybenzyloxycarbonyl, p-nitrobenzyloxycarbonyl, 2-nitrobenzyloxycarbonyl, p-bromobenzyloxycarbonyl, 3,4-dimethoxybenzyloxycarbonyl, 3,5-dimethoxybenzyloxycarbonyl, 2,4-dimethoxybenzyloxycarbonyl, 4-methoxybenzyloxycarbonyl, 2-nitro-4,5-dimethoxybenzyloxycarbonyl, 3,4,5-trimethoxybenzyloxycarbonyl, 1-(p-biphenylyl)-1-methylethoxycarbonyl, α,α-dimethyl-3,5-dimethoxybenzyloxycarbonyl, benzhydryloxy carbonyl, t-butyloxycarbonyl, diisopropylmethoxycarbonyl, isopropyloxycarbonyl, ethoxycarbonyl, methoxycarbonyl, allyloxycarbonyl, 2,2,2,-trichloroethoxycarbonyl, phenoxycarbonyl, 4-nitrophenoxy carbonyl, fluorenyl-9-methoxycarbonyl, cyclopentyloxycarbonyl, adamantyloxycarbonyl, cyclohexyloxycarbonyl, phenylthiocarbonyl, and the like, alkaryl groups such as benzyl, triphenylmethyl, benzyloxymethyl, and the like and silyl groups, such as trimethylsilyl, and the like. Preferred N-protecting groups are formyl, acetyl, benzoyl, pivaloyl, t-butylacetyl, alanyl, phenylsulfonyl, benzyl, t-butyloxycarbonyl (Boc), and benzyloxycarbonyl (Cbz).

[0821] The term “nitro,” as used herein, represents an —NO₂ group.

[0822] The term “oxo” as used herein, represents ═O.

[0823] The term “perfluoroalkyl,” as used herein, represents an alkyl group, as defined herein, where each hydrogen radical bound to the alkyl group has been replaced by a fluoride radical. Perfluoroalkyl groups are exemplified by trifluoromethyl, pentafluoroethyl, and the like.

[0824] The term “perfluoroalkoxy,” as used herein, represents an alkoxy group, as defined herein, where each hydrogen radical bound to the alkoxy group has been replaced by a fluoride radical. Perfluoroalkoxy groups are exemplified by trifluoromethoxy, pentafluoroethoxy, and the like.

[0825] The term “spirocyclyl,” as used herein, represents a C₂₋₇ alkylene diradical, both ends of which are bonded to the same carbon atom of the parent group to form a spirocyclic group, and also a C₁₋₆ heteroalkylene diradical, both ends of which are bonded to the same atom. The heteroalkylene radical forming the spirocyclyl group can containing one, two, three, or four heteroatoms independently selected from the group consisting of nitrogen, oxygen, and sulfur. In some embodiments, the spirocyclyl group includes one to seven carbons, excluding the carbon atom to which the diradical is attached. The spirocyclyl groups of the invention may be optionally substituted with 1, 2, 3, or 4 substituents provided herein as optional substituents for cycloalkyl and/or heterocyclyl groups.

[0826] The term “stereoisomer,” as used herein, refers to all possible different isomeric as well as conformational forms which a compound may possess (e.g., a compound of any formula described herein), in particular all possible stereochemically and conformationally isomeric forms, all diastereomers, enantiomers and/or conformers of the basic molecular structure. Some compounds of the present invention may exist in different tautomeric forms, all of the latter being included within the scope of the present invention.

[0827] The term “sulfoalkyl,” as used herein, represents an alkyl group, as defined herein, substituted by a sulfo group of —SO₃H. In some embodiments, the alkyl group can be further substituted with 1, 2, 3, or 4 substituent groups as described herein.

[0828] The term “sulfonyl,” as used herein, represents an —S(O)₂— group.

[0829] The term “thioalkaryl,” as used herein, represents a chemical substituent of formula —SR, where R is an alkaryl group. In some embodiments, the alkaryl group can be further substituted with 1, 2, 3, or 4 substituent groups as described herein.

[0830] The term “thioalkheterocyclyl,” as used herein, represents a chemical substituent of formula —SR, where R is an alkheterocyclyl group. In some embodiments, the alkheterocyclyl group can be further substituted with 1, 2, 3, or 4 substituent groups as described herein.

[0831] The term “thioalkoxy,” as used herein, represents a chemical substituent of formula —SR,

[0832] where R is an alkyl group, as defined herein. In some embodiments, the alkyl group can be further substituted with 1, 2, 3, or 4 substituent groups as described herein.

[0833] The term “thiol” represents an —SH group.

[0834] Compound: As used herein, the term “compound,” is meant to include all stereoisomers, geometric isomers, tautomers, and isotopes of the structures depicted.

[0835] The compounds described herein can be asymmetric (e.g., having one or more stereocenters). All stereoisomers, such as enantiomers and diastereomers, are intended unless otherwise indicated. Compounds of the present disclosure that contain asymmetrically substituted carbon atoms can be isolated in optically active or racemic forms. Methods on how to prepare optically active forms from optically active starting materials are known in the art, such as by resolution of racemic mixtures or by stereoselective synthesis. Many geometric isomers of olefins, C═N double bonds, and the like can also be present in the compounds described herein, and all such stable isomers are contemplated in the present disclosure. Cis and trans geometric isomers of the compounds of the present disclosure are described and may be isolated as a mixture of isomers or as separated isomeric forms.

[0836] Compounds of the present disclosure also include tautomeric forms. Tautomeric forms result from the swapping of a single bond with an adjacent double bond and the concomitant migration of a proton. Tautomeric forms include prototropic tautomers which are isomeric protonation states having the same empirical formula and total charge. Examples prototropic tautomers include ketone-enol pairs, amide-imidic acid pairs, lactam-lactim pairs, amide-imidic acid pairs, enamine-imine pairs, and annular forms where a proton can occupy two or more positions of a heterocyclic system, such as, 1H— and 3H-imidazole, 1H—, 2H— and 4H-1,2,4-triazole, 1H- and 2H-isoindole, and 1H- and 2H-pyrazole. Tautomeric forms can be in equilibrium or sterically locked into one form by appropriate substitution.

[0837] Compounds of the present disclosure also include all of the isotopes of the atoms occurring in the intermediate or final compounds. “Isotopes” refers to atoms having the same atomic number but different mass numbers resulting from a different number of neutrons in the nuclei. For example, isotopes of hydrogen include tritium and deuterium.

[0838] The compounds and salts of the present disclosure can be prepared in combination with solvent or water molecules to form solvates and hydrates by routine methods.

[0839] Conserved: As used herein, the term “conserved” refers to nucleotides or amino acid residues of a polynucleotide sequence or polypeptide sequence, respectively, that are those that occur unaltered in the same position of two or more sequences being compared. Nucleotides or amino acids that are relatively conserved are those that are conserved amongst more related sequences than nucleotides or amino acids appearing elsewhere in the sequences.

[0840] In some embodiments, two or more sequences are said to be “completely conserved” if they are 100% identical to one another. In some embodiments, two or more sequences are said to be “highly conserved” if they are at least 70% identical, at least 80% identical, at least 90% identical, or at least 95% identical to one another. In some embodiments, two or more sequences are said to be “highly conserved” if they are about 70% identical, about 80% identical, about 90% identical, about 95%, about 98%, or about 99% identical to one another. In some embodiments, two or more sequences are said to be “conserved” if they are at least 30% identical, at least 40% identical, at least 50% identical, at least 60% identical, at least 70% identical, at least 80% identical, at least 90% identical, or at least 95% identical to one another. In some embodiments, two or more sequences are said to be “conserved” if they are about 30% identical, about 40% identical, about 50% identical, about 60% identical, about 70% identical, about 80% identical, about 90% identical, about 95% identical, about 98% identical, or about 99% identical to one another. Conservation of sequence may apply to the entire length of an oligonucleotide or polypeptide or may apply to a portion, region or feature thereof

[0841] Controlled Release: As used herein, the term “controlled release” refers to a pharmaceutical composition or compound release profile that conforms to a particular pattern of release to effect a therapeutic outcome.

[0842] Cyclic or Cyclized: As used herein, the term “cyclic” refers to the presence of a continuous loop. Cyclic molecules need not be circular, only joined to form an unbroken chain of subunits. Cyclic molecules such as the engineered RNA or mRNA of the present invention may be single units or multimers or comprise one or more components of a complex or higher order structure.

[0843] Cytostatic: As used herein, “cytostatic” refers to inhibiting, reducing, suppressing the growth, division, or multiplication of a cell (e.g., a mammalian cell (e.g., a human cell)), bacterium, virus, fungus, protozoan, parasite, prion, or a combination thereof.

[0844] Cytotoxic: As used herein, “cytotoxic” refers to killing or causing injurious, toxic, or deadly effect on a cell (e.g., a mammalian cell (e.g., a human cell)), bacterium, virus, fungus, protozoan, parasite, prion, or a combination thereof

[0845] Delivery: As used herein, “delivery” refers to the act or manner of delivering a compound, substance, entity, moiety, cargo or payload.

[0846] Delivery Agent: As used herein, “delivery agent” refers to any substance which facilitates, at least in part, the in vivo delivery of a nucleic acid molecule to targeted cells.

[0847] Destabilized: As used herein, the term “destable,” “destabilize,” or “destabilizing region” means a region or molecule that is less stable than a starting, wild-type or native form of the same region or molecule.

[0848] Detectable label: As used herein, “detectable label” refers to one or more markers, signals, or moieties which are attached, incorporated or associated with another entity that is readily detected by methods known in the art including radiography, fluorescence, chemiluminescence, enzymatic activity, absorbance and the like. Detectable labels include radioisotopes, fluorophores, chromophores, enzymes, dyes, metal ions, ligands such as biotin, avidin, streptavidin and haptens, quantum dots, and the like. Detectable labels may be located at any position in the peptides or proteins disclosed herein. They may be within the amino acids, the peptides, or proteins, or located at the N- or C-termini.

[0849] Digest: As used herein, the term “digest” means to break apart into smaller pieces or components. When referring to polypeptides or proteins, digestion results in the production of peptides.

[0850] Distal: As used herein, the term “distal” means situated away from the center or away from a point or region of interest.

[0851] Dose splitting factor (DSF)-ratio of PUD of dose split treatment divided by PUD of total daily dose or single unit dose. The value is derived from comparison of dosing regimens groups.

[0852] Encapsulate: As used herein, the term “encapsulate” means to enclose, surround or encase.

[0853] Engineered: As used herein, embodiments of the invention are “engineered” when they are designed to have a feature or property, whether structural or chemical, that varies from a starting point, wild type or native molecule.

[0854] Exosome: As used herein, “exosome” is a vesicle secreted by mammalian cells. Expression: As used herein, “expression” of a nucleic acid sequence refers to one or more of the following events: (1) production of an RNA template from a DNA sequence (e.g., by transcription); (2) processing of an RNA transcript (e.g., by splicing, editing, 5′ cap formation, and/or 3′ end processing); (3) translation of an RNA into a polypeptide or protein; and (4) post-translational modification of a polypeptide or protein.

[0855] Feature: As used herein, a “feature” refers to a characteristic, a property, or a distinctive element.

[0856] Formulation: As used herein, a “formulation” includes at least a modified nucleic acid molecule or mRNA and a delivery agent.

[0857] Fragment: A “fragment,” as used herein, refers to a portion. For example, fragments of proteins may comprise polypeptides obtained by digesting full-length protein isolated from cultured cells.

[0858] Functional: As used herein, a “functional” biological molecule is a biological molecule in a form in which it exhibits a property and/or activity by which it is characterized.

[0859] Homology: As used herein, the term “homology” refers to the overall relatedness between polymeric molecules, e.g. between nucleic acid molecules (e.g. DNA molecules and/or RNA molecules) and/or between polypeptide molecules. In some embodiments, polymeric molecules are considered to be “homologous” to one another if their sequences are at least 25%, 30%, 35%, 40%, 45%, 50%, 55%, 60%, 65%, 70%, 75%, 80%, 85%, 90%, 95%, or 99% identical or similar. The term “homologous” necessarily refers to a comparison between at least two sequences (polynucleotide or polypeptide sequences). In accordance with the invention, two polynucleotide sequences are considered to be homologous if the polypeptides they encode are at least about 50%, 60%, 70%, 80%, 90%, 95%, or even 99% for at least one stretch of at least about 20 amino acids. In some embodiments, homologous polynucleotide sequences are characterized by the ability to encode a stretch of at least 4-5 uniquely specified amino acids. For polynucleotide sequences less than 60 nucleotides in length, homology is determined by the ability to encode a stretch of at least 4-5 uniquely specified amino acids. In accordance with the invention, two protein sequences are considered to be homologous if the proteins are at least about 50%, 60%, 70%, 80%, or 90% identical for at least one stretch of at least about 20 amino acids.

[0860] Identity: As used herein, the term “identity” refers to the overall relatedness between polymeric molecules, e.g., between oligonucleotide molecules (e.g. DNA molecules and/or RNA molecules) and/or between polypeptide molecules. Calculation of the percent identity of two polynucleotide sequences, for example, can be performed by aligning the two sequences for optimal comparison purposes (e.g., gaps can be introduced in one or both of a first and a second nucleic acid sequences for optimal alignment and non-identical sequences can be disregarded for comparison purposes). In certain embodiments, the length of a sequence aligned for comparison purposes is at least 30%, at least 40%, at least 50%, at least 60%, at least 70%, at least 80%, at least 90%, at least 95%, or 100% of the length of the reference sequence. The nucleotides at corresponding nucleotide positions are then compared. When a position in the first sequence is occupied by the same nucleotide as the corresponding position in the second sequence, then the molecules are identical at that position. The percent identity between the two sequences is a function of the number of identical positions shared by the sequences, taking into account the number of gaps, and the length of each gap, which needs to be introduced for optimal alignment of the two sequences. The comparison of sequences and determination of percent identity between two sequences can be accomplished using a mathematical algorithm. For example, the percent identity between two nucleotide sequences can be determined using methods such as those described in Computational Molecular Biology, Lesk, A. M., ed., Oxford University Press, New York, 1988; Biocomputing: Informatics and Genome Projects, Smith, D. W., ed., Academic Press, New York, 1993; Sequence Analysis in Molecular Biology, von Heinje, G., Academic Press, 1987; Computer Analysis of Sequence Data, Part I, Griffin, A. M., and Griffin, H. G., eds., Humana Press, New Jersey, 1994; and Sequence Analysis Primer, Gribskov, M. and Devereux, J., eds., M Stockton Press, New York, 1991; each of which is incorporated herein by reference. For example, the percent identity between two nucleotide sequences can be determined using the algorithm of Meyers and Miller (CABIOS, 1989, 4:11-17; herein incorporated by reference in its entirety), which has been incorporated into the ALIGN program (version 2.0) using a PAM120 weight residue table, a gap length penalty of 12 and a gap penalty of 4. The percent identity between two nucleotide sequences can, alternatively, be determined using the GAP program in the GCG software package using an NWSgapdna.CMP matrix. Methods commonly employed to determine percent identity between sequences include, but are not limited to those disclosed in Carillo, H., and Lipman, D., SIAM J Applied Math., 48:1073 (1988); incorporated herein by reference in its entirety.

[0861] Techniques for determining identity are codified in publicly available computer programs. Exemplary computer software to determine homology between two sequences include, but are not limited to, GCG program package, Devereux, J., et al., Nucleic Acids Research, 12(1), 387 (1984); herein incorporated by reference in its entirety, BLASTP, BLASTN, and FASTA Atschul, S. F. et al., J. Molec. Biol., 215, 403 (1990); herein incorporated by reference in its entirety.

[0862] Inhibit expression of a gene: As used herein, the phrase “inhibit expression of a gene” means to cause a reduction in the amount of an expression product of the gene. The expression product can be an RNA transcribed from the gene (e.g., an mRNA) or a polypeptide translated from an mRNA transcribed from the gene. Typically a reduction in the level of an mRNA results in a reduction in the level of a polypeptide translated therefrom. The level of expression may be determined using standard techniques for measuring mRNA or protein.

[0863] In vitro: As used herein, the term “in vitro” refers to events that occur in an artificial environment, e.g., in a test tube or reaction vessel, in cell culture, in a Petri dish, etc., rather than within an organism (e.g., animal, plant, or microbe).

[0864] In vivo: As used herein, the term “in vivo” refers to events that occur within an organism (e.g., animal, plant, or microbe or cell or tissue thereof).

[0865] Isolated: As used herein, the term “isolated” refers to a substance or entity that has been separated from at least some of the components with which it was associated (whether in nature or in an experimental setting). Isolated substances may have varying levels of purity in reference to the substances from which they have been associated. Isolated substances and/or entities may be separated from at least about 10%, about 20%, about 30%, about 40%, about 50%, about 60%, about 70%, about 80%, about 90%, or more of the other components with which they were initially associated. In some embodiments, isolated agents are more than about 80%, about 85%, about 90%, about 91%, about 92%, about 93%, about 94%, about 95%, about 96%, about 97%, about 98%, about 99%, or more than about 99% pure. As used herein, a substance is “pure” if it is substantially free of other components. Substantially isolated: By “substantially isolated” is meant that the compound is substantially separated from the environment in which it was formed or detected. Partial separation can include, for example, a composition enriched in the compound of the present disclosure. Substantial separation can include compositions containing at least about 50%, at least about 60%, at least about 70%, at least about 80%, at least about 90%, at least about 95%, at least about 97%, or at least about 99% by weight of the compound of the present disclosure, or salt thereof. Methods for isolating compounds and their salts are routine in the art.

[0866] Linker: As used herein, a linker refers to a group of atoms, e.g., 10-1,000 atoms, and can be comprised of the atoms or groups such as, but not limited to, carbon, amino, alkylamino, oxygen, sulfur, sulfoxide, sulfonyl, carbonyl, and imine. The linker can be attached to a modified nucleoside or nucleotide on the nucleobase or sugar moiety at a first end, and to a payload, e.g., a detectable or therapeutic agent, at a second end. The linker may be of sufficient length as to not interfere with incorporation into a nucleic acid sequence. The linker can be used for any useful purpose, such as to form mRNA multimers (e.g., through linkage of two or more modified nucleic acid molecules or mRNA molecules) or mRNA conjugates, as well as to administer a payload, as described herein. Examples of chemical groups that can be incorporated into the linker include, but are not limited to, alkyl, alkenyl, alkynyl, amido, amino, ether, thioether, ester, alkylene, heteroalkylene, aryl, or heterocyclyl, each of which can be optionally substituted, as described herein. Examples of linkers include, but are not limited to, unsaturated alkanes, polyethylene glycols (e.g., ethylene or propylene glycol monomeric units, e.g., diethylene glycol, dipropylene glycol, triethylene glycol, tripropylene glycol, tetraethylene glycol, or tetraethylene glycol), and dextran polymers and derivatives thereof. Other examples include, but are not limited to, cleavable moieties within the linker, such as, for example, a disulfide bond (—S—S—) or an azo bond (—N═N—), which can be cleaved using a reducing agent or photolysis. Non-limiting examples of a selectively cleavable bond include an amido bond can be cleaved for example by the use of tris(2-carboxyethyl)phosphine (TCEP), or other reducing agents, and/or photolysis, as well as an ester bond can be cleaved for example by acidic or basic hydrolysis.

[0867] MicroRNA (miRNA) binding site: As used herein, a microRNA (miRNA) binding site represents a nucleotide location or region of a nucleic acid transcript to which at least the “seed” region of a miRNA binds.

[0868] Modified: As used herein “modified” refers to a changed state or structure of a molecule of the invention. Molecules may be modified in many ways including chemically, structurally, and functionally. In one embodiment, the mRNA molecules of the present invention are modified by the introduction of non-natural nucleosides and/or nucleotides.

[0869] Mucus: As used herein, “mucus” refers to a natural substance that is viscous and comprises mucin glycoproteins.

[0870] Naturally occurring: As used herein, “naturally occurring” means existing in nature without artificial aid.

[0871] Non-human vertebrate: As used herein, a “non human vertebrate” includes all vertebrates except Homo sapiens, including wild and domesticated species. Examples of non-human vertebrates include, but are not limited to, mammals, such as alpaca, banteng, bison, camel, cat, cattle, deer, dog, donkey, gayal, goat, guinea pig, horse, llama, mule, pig, rabbit, reindeer, sheep water buffalo, and yak.

[0872] Off-target: As used herein, “off target” refers to any unintended effect on any one or more target, gene, or cellular transcript.

[0873] Open reading frame: As used herein, “open reading frame” or “ORF” refers to a sequence which does not contain a stop codon in a given reading frame.

[0874] Operably linked: As used herein, the phrase “operably linked” refers to a functional connection between two or more molecules, constructs, transcripts, entities, moieties or the like.

[0875] Paratope: As used herein, a “paratope” refers to the antigen-binding site of an antibody.

[0876] Patient: As used herein, “patient” refers to a subject who may seek or be in need of treatment, requires treatment, is receiving treatment, will receive treatment, or a subject who is under care by a trained professional for a particular disease or condition.

[0877] Peptide: As used herein, “peptide” is less than or equal to 50 amino acids long, e.g., about 5, 10, 15, 20, 25, 30, 35, 40, 45, or 50 amino acids long.

[0878] Pharmaceutically acceptable: The phrase “pharmaceutically acceptable” is employed herein to refer to those compounds, materials, compositions, and/or dosage forms which are, within the scope of sound medical judgment, suitable for use in contact with the tissues of human beings and animals without excessive toxicity, irritation, allergic response, or other problem or complication, commensurate with a reasonable benefit/risk ratio.

[0879] Pharmaceutically acceptable excipients: The phrase “pharmaceutically acceptable excipient,” as used herein, refers any ingredient other than the compounds described herein (for example, a vehicle capable of suspending or dissolving the active compound) and having the properties of being substantially nontoxic and non-inflammatory in a patient. Excipients may include, for example: antiadherents, antioxidants, binders, coatings, compression aids, disintegrants, dyes (colors), emollients, emulsifiers, fillers (diluents), film formers or coatings, flavors, fragrances, glidants (flow enhancers), lubricants, preservatives, printing inks, sorbents, suspensing or dispersing agents, sweeteners, and waters of hydration. Exemplary excipients include, but are not limited to: butylated hydroxytoluene (BHT), calcium carbonate, calcium phosphate (dibasic), calcium stearate, croscarmellose, crosslinked polyvinyl pyrrolidone, citric acid, crospovidone, cysteine, ethylcellulose, gelatin, hydroxypropyl cellulose, hydroxypropyl methylcellulose, lactose, magnesium stearate, maltitol, mannitol, methionine, methylcellulose, methyl paraben, microcrystalline cellulose, polyethylene glycol, polyvinyl pyrrolidone, povidone, pregelatinized starch, propyl paraben, retinyl palmitate, shellac, silicon dioxide, sodium carboxymethyl cellulose, sodium citrate, sodium starch glycolate, sorbitol, starch (corn), stearic acid, sucrose, talc, titanium dioxide, vitamin A, vitamin E, vitamin C, and xylitol.

[0880] Pharmaceutically acceptable salts: The present disclosure also includes pharmaceutically acceptable salts of the compounds described herein. As used herein, “pharmaceutically acceptable salts” refers to derivatives of the disclosed compounds wherein the parent compound is modified by converting an existing acid or base moiety to its salt form (e.g., by reacting the free base group with a suitable organic acid). Examples of pharmaceutically acceptable salts include, but are not limited to, mineral or organic acid salts of basic residues such as amines; alkali or organic salts of acidic residues such as carboxylic acids; and the like. Representative acid addition salts include acetate, adipate, alginate, ascorbate, aspartate, benzenesulfonate, benzoate, bisulfate, borate, butyrate, camphorate, camphorsulfonate, citrate, cyclopentanepropionate, digluconate, dodecylsulfate, ethanesulfonate, fumarate, glucoheptonate, glycerophosphate, hemisulfate, heptonate, hexanoate, hydrobromide, hydrochloride, hydroiodide, 2-hydroxy-ethanesulfonate, lactobionate, lactate, laurate, lauryl sulfate, malate, maleate, malonate, methanesulfonate, 2-naphthalenesulfonate, nicotinate, nitrate, oleate, oxalate, palmitate, pamoate, pectinate, persulfate, 3-phenylpropionate, phosphate, picrate, pivalate, propionate, stearate, succinate, sulfate, tartrate, thiocyanate, toluenesulfonate, undecanoate, valerate salts, and the like. Representative alkali or alkaline earth metal salts include sodium, lithium, potassium, calcium, magnesium, and the like, as well as nontoxic ammonium, quaternary ammonium, and amine cations, including, but not limited to ammonium, tetramethylammonium, tetraethylammonium, methylamine, dimethylamine, trimethylamine, triethylamine, ethylamine, and the like. The pharmaceutically acceptable salts of the present disclosure include the conventional non-toxic salts of the parent compound formed, for example, from non-toxic inorganic or organic acids. The pharmaceutically acceptable salts of the present disclosure can be synthesized from the parent compound which contains a basic or acidic moiety by conventional chemical methods. Generally, such salts can be prepared by reacting the free acid or base forms of these compounds with a stoichiometric amount of the appropriate base or acid in water or in an organic solvent, or in a mixture of the two; generally, nonaqueous media like ether, ethyl acetate, ethanol, isopropanol, or acetonitrile are preferred. Lists of suitable salts are found in Remington's Pharmaceutical Sciences, 17^{th} ed., Mack Publishing Company, Easton, Pa., 1985, p. 1418, Pharmaceutical Salts: Properties, Selection, and Use, P. H. Stahl and C. G. Wermuth (eds.), Wiley-VCH, 2008, and Berge et al., Journal of Pharmaceutical Science, 66, 1-19 (1977), each of which is incorporated herein by reference in its entirety.

[0881] Pharmaceutically acceptable solvate: The term “pharmaceutically acceptable solvate,” as used herein, means a compound of the invention wherein molecules of a suitable solvent are incorporated in the crystal lattice. A suitable solvent is physiologically tolerable at the dosage administered. For example, solvates may be prepared by crystallization, recrystallization, or precipitation from a solution that includes organic solvents, water, or a mixture thereof. Examples of suitable solvents are ethanol, water (for example, mono-, di-, and tri-hydrates), N-methylpyrrolidinone (NMP), dimethyl sulfoxide (DMSO), N,N′-dimethylformamide (DMF), N,N′-dimethylacetamide (DMAC), 1,3-dimethyl-2-imidazolidinone (DMEU), 1,3-dimethyl-3,4,5,6-tetrahydro-2-(1H)-pyrimidinone (DMPU), acetonitrile (ACN), propylene glycol, ethyl acetate, benzyl alcohol, 2-pyrrolidone, benzyl benzoate, and the like. When water is the solvent, the solvate is referred to as a “hydrate.”

[0882] Pharmacokinetic: As used herein, “pharmacokinetic” refers to any one or more properties of a molecule or compound as it relates to the determination of the fate of substances administered to a living organism. Pharmacokinetics is divided into several areas including the extent and rate of absorption, distribution, metabolism and excretion. This is commonly referred to as ADME where: (A) Absorption is the process of a substance entering the blood circulation; (D) Distribution is the dispersion or dissemination of substances throughout the fluids and tissues of the body; (M) Metabolism (or Biotransformation) is the irreversible transformation of parent compounds into daughter metabolites; and (E) Excretion (or Elimination) refers to the elimination of the substances from the body. In rare cases, some drugs irreversibly accumulate in body tissue.

[0883] Pharmacologic effect: As used herein, a “pharmacologic effect” is a measurable biologic phenomenon in an organism or system which occurs after the organism or system has been contacted with or exposed to an exogenous agent. Pharmacologic effects may result in therapeutically effective outcomes such as the treatment, improvement of one or more symptoms, diagnosis, prevention, and delay of onset of disease, disorder, condition or infection. Measurement of such biologic phenomena may be quantitative, qualitative or relative to another biologic phenomenon. Quantitative measurements may be statistically significant. Qualitative measurements may be by degree or kind and may be at least 10%, 20%, 30%, 40%, 50%, 60%, 70%, 80%, 90% or more different. They may be observable as present or absent, better or worse, greater or less. Exogenous agents, when referring to pharmacologic effects are those agents which are, in whole or in part, foreign to the organism or system. For example, modifications to a wild type biomolecule, whether structural or chemical, would produce an exogenous agent. Likewise, incorporation or combination of a wild type molecule into or with a compound, molecule or substance not found naturally in the organism or system would also produce an exogenous agent. The modified mRNA of the present invention, comprise exogenous agents. Examples of pharmacologic effects include, but are not limited to, alteration in cell count such as an increase or decrease in neutrophils, reticulocytes, granulocytes, erythrocytes (red blood cells), megakaryocytes, platelets, monocytes, connective tissue macrophages, epidermal langerhans cells, osteoclasts, dendritic cells, microglial cells, neutrophils, eosinophils, basophils, mast cells, helper T cells, suppressor T cells, cytotoxic T cells, natural killer T cells, B cells, natural killer cells, or reticulocytes. Pharmacologic effects also include alterations in blood chemistry, pH, hemoglobin, hematocrit, changes in levels of enzymes such as, but not limited to, liver enzymes AST and ALT, changes in lipid profiles, electrolytes, metabolic markers, hormones or other marker or profile known to those of skill in the art.

[0884] Physicochemical: As used herein, “physicochemical” means of or relating to a physical and/or chemical property.

[0885] Preventing: As used herein, the term “preventing” refers to partially or completely delaying onset of an infection, disease, disorder and/or condition; partially or completely delaying onset of one or more symptoms, features, or clinical manifestations of a particular infection, disease, disorder, and/or condition; partially or completely delaying onset of one or more symptoms, features, or manifestations of a particular infection, disease, disorder, and/or condition; partially or completely delaying progression from an infection, a particular disease, disorder and/or condition; and/or decreasing the risk of developing pathology associated with the infection, the disease, disorder, and/or condition.

[0886] Prodrug: The present disclosure also includes prodrugs of the compounds described herein. As used herein, “prodrugs” refer to any substance, molecule or entity which is in a form predicate for that substance, molecule or entity to act as a therapeutic upon chemical or physical alteration. Prodrugs may by covalently bonded or sequestested in some way and which release or are converted into the active drug moiety prior to, upon or after administered to a mammalian subject. Prodrugs can be prepared by modifying functional groups present in the compounds in such a way that the modifications are cleaved, either in routine manipulation or in vivo, to the parent compounds. Prodrugs include compounds wherein hydroxyl, amino, sulfhydryl, or carboxyl groups are bonded to any group that, when administered to a mammalian subject, cleaves to form a free hydroxyl, amino, sulfhydryl, or carboxyl group respectively. Preparation and use of prodrugs is discussed in T. Higuchi and V. Stella, “Pro-drugs as Novel Delivery Systems,” Vol. 14 of the A.C.S. Symposium Series, and in Bioreversible Carriers in Drug Design, ed. Edward B. Roche, American Pharmaceutical Association and Pergamon Press, 1987, both of which are hereby incorporated by reference in their entirety.

[0887] Proliferate: As used herein, the term “proliferate” means to grow, expand or increase or cause to grow, expand or increase rapidly. “Proliferative” means having the ability to proliferate. “Anti-proliferative” means having properties counter to or inapposite to proliferative properties.

[0888] Protein of interest: As used herein, the terms “proteins of interest” or “desired proteins” include those provided herein and fragments, mutants, variants, and alterations thereof

[0889] Proximal: As used herein, the term “proximal” means situated nearer to the center or to a point or region of interest.

[0890] Pseudouridine: As used herein, pseudouridine refers to the C-glycoside isomer of the nucleoside uridine. A “pseudouridine analog” is any modification, variant, isoform or derivative of pseudouridine. For example, pseudouridine analogs include but are not limited to 1-carboxymethyl-pseudouridine, 1-propynyl-pseudouridine, 1-taurinomethyl-pseudouridine, 1-taurinomethyl-4-thio-pseudouridine, 1-methyl-pseudouridine (m¹ψ), 1-methyl-4-thio-pseudouridine (m¹s⁴ψ), 4-thio-1-methyl-pseudouridine, 3-methyl-pseudouridine (m³ψ), 2-thio-1-methyl-pseudouridine, 1-methyl-1-deaza-pseudouridine, 2-thio-1-methyl-1-deaza-pseudouridine, dihydropseudouridine, 2-thio-dihydropseudouridine, 2-methoxyuridine, 2-methoxy-4-thio-uridine, 4-methoxy-pseudouridine, 4-methoxy-2-thio-pseudouridine, N1-methyl-pseudouridine, 1-methyl-3-(3-amino-3-carboxypropyl)pseudouridine (acp³ψ), and 2′-O-methyl-pseudouridine (ψm).

[0891] Purified: As used herein, “purify,” “purified,” “purification” means to make substantially pure or clear from unwanted components, material defilement, admixture or imperfection.

[0892] Sample: As used herein, the term “sample” refers to a subset of its tissues, cells or component parts (e.g. body fluids, including but not limited to blood, mucus, lymphatic fluid, synovial fluid, cerebrospinal fluid, saliva, amniotic fluid, amniotic cord blood, urine, vaginal fluid and semen). A sample further may include a homogenate, lysate or extract prepared from a whole organism or a subset of its tissues, cells or component parts, or a fraction or portion thereof, including but not limited to, for example, plasma, serum, spinal fluid, lymph fluid, the external sections of the skin, respiratory, intestinal, and genitourinary tracts, tears, saliva, milk, blood cells, tumors, organs. A sample further refers to a medium, such as a nutrient broth or gel, which may contain cellular components, such as proteins or nucleic acid molecule.

[0893] Signal Sequences: As used herein, the phrase “signal sequences” refers to a sequence which can direct the transport or localization of a protein.

[0894] Single unit dose: As used herein, a “single unit dose” is a dose of any therapeutic administed in one dose/at one time/single route/single point of contact, i.e., single administration event.

[0895] Similarity: As used herein, the term “similarity” refers to the overall relatedness between polymeric molecules, e.g. between polynucleotide molecules (e.g. DNA molecules and/or RNA molecules) and/or between polypeptide molecules. Calculation of percent similarity of polymeric molecules to one another can be performed in the same manner as a calculation of percent identity, except that calculation of percent similarity takes into account conservative substitutions as is understood in the art.

[0896] Split dose: As used herein, a “split dose” is the division of single unit dose or total daily dose into two or more doses.

[0897] Stable: As used herein “stable” refers to a compound that is sufficiently robust to survive isolation to a useful degree of purity from a reaction mixture, and preferably capable of formulation into an efficacious therapeutic agent.

[0898] Stabilized: As used herein, the term “stabilize”, “stabilized,” “stabilized region” means to make or become stable.

[0899] Subject: As used herein, the term “subject” or “patient” refers to any organism to which a composition in accordance with the invention may be administered, e.g., for experimental, diagnostic, prophylactic, and/or therapeutic purposes. Typical subjects include animals (e.g., mammals such as mice, rats, rabbits, non-human primates, and humans) and/or plants.

[0900] Substantially: As used herein, the term “substantially” refers to the qualitative condition of exhibiting total or near-total extent or degree of a characteristic or property of interest. One of ordinary skill in the biological arts will understand that biological and chemical phenomena rarely, if ever, go to completion and/or proceed to completeness or achieve or avoid an absolute result. The term “substantially” is therefore used herein to capture the potential lack of completeness inherent in many biological and chemical phenomena.

[0901] Substantially equal: As used herein as it relates to time differences between doses, the term means plus/minus 2%.

[0902] Substantially simultaneously: As used herein and as it relates to plurality of doses, the term means within 2 seconds.

[0903] Suffering from: An individual who is “suffering from” a disease, disorder, and/or condition has been diagnosed with or displays one or more symptoms of a disease, disorder, and/or condition.

[0904] Susceptible to: An individual who is “susceptible to” a disease, disorder, and/or condition has not been diagnosed with and/or may not exhibit symptoms of the disease, disorder, and/or condition but harbors a propensity to develop a disease or its symptoms. In some embodiments, an individual who is susceptible to a disease, disorder, and/or condition (for example, cancer) may be characterized by one or more of the following: (1) a genetic mutation associated with development of the disease, disorder, and/or condition; (2) a genetic polymorphism associated with development of the disease, disorder, and/or condition; (3) increased and/or decreased expression and/or activity of a protein and/or nucleic acid associated with the disease, disorder, and/or condition; (4) habits and/or lifestyles associated with development of the disease, disorder, and/or condition; (5) a family history of the disease, disorder, and/or condition; and (6) exposure to and/or infection with a microbe associated with development of the disease, disorder, and/or condition. In some embodiments, an individual who is susceptible to a disease, disorder, and/or condition will develop the disease, disorder, and/or condition. In some embodiments, an individual who is susceptible to a disease, disorder, and/or condition will not develop the disease, disorder, and/or condition.

[0905] Sustained release: As used herein, the term “sustained release” refers to a pharmaceutical composition or compound release profile that conforms to a release rate over a specific period of time.

[0906] Synthetic: The term “synthetic” means produced, prepared, and/or manufactured by the hand of man. Synthesis of polynucleotides or polypeptides or other molecules of the present invention may be chemical or enzymatic.

[0907] Targeted Cells: As used herein, “targeted cells” refers to any one or more cells of interest. The cells may be found in vitro, in vivo, in situ or in the tissue or organ of an organism. The organism may be an animal, preferably a mammal, more preferably a human and most preferably a patient.

[0908] Therapeutic Agent: The term “therapeutic agent” refers to any agent that, when administered to a subject, has a therapeutic, diagnostic, and/or prophylactic effect and/or elicits a desired biological and/or pharmacological effect.

[0909] Therapeutically effective amount: As used herein, the term “therapeutically effective amount” means an amount of an agent to be delivered (e.g., nucleic acid, drug, therapeutic agent, diagnostic agent, prophylactic agent, etc.) that is sufficient, when administered to a subject suffering from or susceptible to a disease, disorder, and/or condition, to treat, improve symptoms of, diagnose, prevent, and/or delay the onset of the disease, disorder, and/or condition.

[0910] Therapeutically effective outcome: As used herein, the term “therapeutically effective outcome” means an outcome that is sufficient in a subject suffering from or susceptible to an infection, disease, disorder, and/or condition, to treat, improve symptoms of, diagnose, prevent, and/or delay the onset of the infection, disease, disorder, and/or condition.

[0911] Total daily dose: As used herein, a “total daily dose” is an amount given or prescribed in 24 hr period. It may be administered as a single unit dose.

[0912] Transcription factor: As used herein, the term “transcription factor” refers to a DNA-binding protein that regulates transcription of DNA into RNA, for example, by activation or repression of transcription. Some transcription factors effect regulation of transcription alone, while others act in concert with other proteins. Some transcription factor can both activate and repress transcription under certain conditions. In general, transcription factors bind a specific target sequence or sequences highly similar to a specific consensus sequence in a regulatory region of a target gene. Transcription factors may regulate transcription of a target gene alone or in a complex with other molecules.

[0913] Treating: As used herein, the term “treating” refers to partially or completely alleviating, ameliorating, improving, relieving, delaying onset of, inhibiting progression of, reducing severity of, and/or reducing incidence of one or more symptoms or features of a particular disease, disorder, and/or condition. For example, “treating” cancer may refer to inhibiting survival, growth, and/or spread of a tumor. Treatment may be administered to a subject who does not exhibit signs of a disease, disorder, and/or condition and/or to a subject who exhibits only early signs of a disease, disorder, and/or condition for the purpose of decreasing the risk of developing pathology associated with the disease, disorder, and/or condition.

[0914] Unmodified: As used herein, “unmodified” refers to any substance, compound or molecule prior to being changed in any way. Unmodified may, but does not always, refer to the wild type or native form of a biomolecule. Molecules may undergo a series of modifications whereby each modified molecule may serve as the “unmodified” starting molecule for a subsequent modification.

[0915] Viability: As used herein, the term “viability” refers to the ability of a thing (a living organism, an artificial system, an organ, tissue, explant, etc.) to maintain itself or recover its potentialities. In the context of the present invention, organ viability may be improved through the use of the modified mRNAs. To “increase the viability” of an organ or tissue or explant refers to improving the usefulness or integrity of the organ, tissue or explants. To “increase the longevity” of an organ or tissue or explant refers to prolong as a function of time, the ability of the organ or tissue or explants to maintain a desired status or recover a desired status. As used herein, an organ, tissue or explants “status” refers to the physiological, physical or chemical state of being. A “useable status” is one in which the organ, tissue or explants may be employed for a desired study, experiment, investigation, trial, or other exploratory event. To “increase the functionality” of an organ, tissue or explant means to maintain or improve the ability of the organ, tissue or explant to operate as it normally would.

### Equivalents and Scope

[0916] Those skilled in the art will recognize, or be able to ascertain using no more than routine experimentation, many equivalents to the specific embodiments in accordance with the invention described herein. The scope of the present invention is not intended to be limited to the above Description, but rather is as set forth in the appended claims.

[0917] In the claims, articles such as “a,” “an,” and “the” may mean one or more than one unless indicated to the contrary or otherwise evident from the context. Claims or descriptions that include “or” between one or more members of a group are considered satisfied if one, more than one, or all of the group members are present in, employed in, or otherwise relevant to a given product or process unless indicated to the contrary or otherwise evident from the context. The invention includes embodiments in which exactly one member of the group is present in, employed in, or otherwise relevant to a given product or process. The invention includes embodiments in which more than one, or all of the group members are present in, employed in, or otherwise relevant to a given product or process.

[0918] It is also noted that the term “comprising” is intended to be open and permits the inclusion of additional elements or steps.

[0919] Where ranges are given, endpoints are included. Furthermore, it is to be understood that unless otherwise indicated or otherwise evident from the context and understanding of one of ordinary skill in the art, values that are expressed as ranges can assume any specific value or subrange within the stated ranges in different embodiments of the invention, to the tenth of the unit of the lower limit of the range, unless the context clearly dictates otherwise.

[0920] In addition, it is to be understood that any particular embodiment of the present invention that falls within the prior art may be explicitly excluded from any one or more of the claims. Since such embodiments are deemed to be known to one of ordinary skill in the art, they may be excluded even if the exclusion is not set forth explicitly herein. Any particular embodiment of the compositions of the invention (e.g., any nucleic acid or protein encoded thereby; any method of production; any method of use; etc.) can be excluded from any one or more claims, for any reason, whether or not related to the existence of prior art.

[0921] All cited sources, for example, references, publications, databases, database entries, and art cited herein, are incorporated into this application by reference, even if not expressly stated in the citation. In case of conflicting statements of a cited source and the instant application, the statement in the instant application shall control.

### EXAMPLES

### Example 1

### Modified mRNA Production

[0922] Modified mRNAs according to the invention are made using standard laboratory methods and materials.

[0923] The open reading frame with various upstream or downstream additions ((3-globin, tags, etc.) is ordered from DNA2.0 (Menlo Park, Calif.) and typically contains a multiple cloning site with XbaI recognition. Upon receipt of the construct, it is reconstituted and transformed into chemically competent E. coli. For the present invention, NEB DH5-alpha Competent E. coli are used. Transformations are performed according to NEB instructions using 100 ng of plasmid. The protocol is as follows:
[0924] 1. Thaw a tube of NEB 5-alpha Competent E. coli cells on ice for 10 minutes.
[0925] 2. Add 1-5 μl containing 1 pg-100 ng of plasmid DNA to the cell mixture. Carefully flick the tube 4-5 times to mix cells and DNA. Do not vortex.
[0926] 3. Place the mixture on ice for 30 minutes. Do not mix.
[0927] 4. Heat shock at 42° C. for exactly 30 seconds. Do not mix.
[0928] 5. Place on ice for 5 minutes. Do not mix.
[0929] 6. Pipette 950 μl of room temperature SOC into the mixture.
[0930] 7. Place at 37° C. for 60 minutes. Shake vigorously (250 rpm) or rotate.
[0931] 8. Warm selection plates to 37° C.
[0932] 9. Mix the cells thoroughly by flicking the tube and inverting.

[0933] Spread 50-100 μl of each dilution onto a selection plate and incubate overnight at 37° C. Alternatively, incubate at 30° C. for 24-36 hours or 25° C. for 48 hours.

[0934] A single colony is then used to inoculate 5 ml of LB growth media using the appropriate antibiotic and then allowed to grow (250 RPM, 37° C.) for 5 hours. This is then used to inoculate a 200 ml culture medium and allowed to grow overnight under the same conditions.

[0935] To isolate the plasmid (up to 850 μg), a maxi prep is performed using the Invitrogen PureLink™ HiPure Maxiprep Kit (Carlsbad, Calif.), following the manufacturer's instructions.

[0936] In order to generate cDNA for In Vitro Transcription (IVT), the plasmid is first linearized using a restriction enzyme such as XbaI. A typical restriction digest with XbaI will comprise the following: Plasmid 1.0 μg; 10× Buffer 1.0 μl; XbaI 1.5 μl; dH₂O up to 10 μl; incubated at 37° C. for 1 hr. If performing at lab scale (<5 μg), the reaction is cleaned up using Invitrogen's PureLink™ PCR Micro Kit (Carlsbad, Calif.) per manufacturer's instructions. Larger scale purifications may need to be done with a product that has a larger load capacity such as Invitrogen's standard PureLink PCR Kit (Carlsbad, Calif.). Following the cleanup, the linearized vector is quantified using the NanoDrop and analyzed to confirm linearization using agarose gel electrophoresis.

[0937] As a non-limiting example, G-CSF may represent the polypeptide of interest. Sequences used in the steps outlined in Examples 1-5 are shown in Table 5. It should be noted that the start codon (ATG or AUG) has been underlined in Table 5.

TABLE 5
G-CSF Sequences

| SEQ | |
|---|---|
| ID | |
| NO | Description |
| 253 | cDNA sequence: |
| | ATGGCTGGACCTGCCACCCAGAGCCCCATGAAGCTGATGGCCCTG |
| | CAGCTGCTGCTGTGGCACAGTGCACTCTGGACAGTGCAGGAAGCC |
| | ACCCCCCTGGGCCCTGCCAGCTCCCTGCCCCAGAGCTTCCTGCTC |
| | AAGTGCTTAGAGCAAGTGAGGAAGATCCAGGGCGATGGCGCAGCG |
| | CTCCAGGAGAAGCTGTGTGCCACCTACAAGCTGTGCCACCCCGAG |
| | GAGCTGGTGCTGCTCGGACACTCTCTGGGCATCCCCTGGGCTCCC |
| | CTGAGCAGCTGCCCCAGCCAGGCCCTGCAGCTGGCAGGCTGCTTG |
| | AGCCAACTCCATAGCGGCCTTTTCCTCTACCAGGGGCTCCTGCAG |
| | GCCCTGGAAGGGATCTCCCCCGAGTTGGGTCCCACCTTGGACACA |
| | CTGCAGCTGGACGTCGCCGACTTTGCCACCACCATCTGGCAGCAG |
| | ATGGAAGAACTGGGAATGGCCCCTGCCCTGCAGCCCACCCAGGGT |
| | GCCATGCCGGCCTTCGCCTCTGCTTTCCAGCGCCGGGCAGGAGGG |
| | GTCCTGGTTGCCTCCCATCTGCAGAGCTTCCTGGAGGTGTCGTAC |
| | CGCGTTCTACGCCACCTTGCCCAGCCCTGA |
| 254 | cDNA having T7 polymerase site, AfeI and Xba |
| | restriction site: |
| | TAATACGACTCACTATA |
| | GGGAAATAAGAGAGAAAAGAAGAGTAAGAAGAAATATAAGAGCCA |
| | CCATGGCTGGACCTGCCACCCAGAGCCCCATGAAGCTGATGGCCC |
| | TGCAGCTGCTGCTGTGGCACAGTGCACTCTGGACAGTGCAGGAAG |
| | CCACCCCCCTGGGCCCTGCCAGCTCCCTGCCCCAGAGCTTCCTGC |
| | TCAAGTGCTTAGAGCAAGTGAGGAAGATCCAGGGCGATGGCGCAG |
| | CGCTCCAGGAGAAGCTGTGTGCCACCTACAAGCTGTGCCACCCCG |
| | AGGAGCTGGTGCTGCTCGGACACTCTCTGGGCATCCCCTGGGCTC |
| | CCCTGAGCAGCTGCCCCAGCCAGGCCCTGCAGCTGGCAGGCTGCT |
| | TGAGCCAACTCCATAGCGGCCTTTTCCTCTACCAGGGGCTCCTGC |
| | AGGCCCTGGAAGGGATCTCCCCCGAGTTGGGTCCCACCTTGGACA |
| | CACTGCAGCTGGACGTCGCCGACTTTGCCACCACCATCTGGCAGC |
| | AGATGGAAGAACTGGGAATGGCCCCTGCCCTGCAGCCCACCCAGG |
| | GTGCCATGCCGGCCTTCGCCTCTGCTTTCCAGCGCCGGGCAGGAG |
| | GGGTCCTGGTTGCCTCCCATCTGCAGAGCTTCCTGGAGGTGTCGT |
| | ACCGCGTTCTACGCCACCTTGCCCAGCCCTGAAGCGCTGCCTTCT |
| | GCGGGGCTTGCCTTCTGGCCATGCCCTTCTTCTCTCCCTTGCACC |
| | TGTACCTCTTGGTCTTTGAATAAAGCCTGAGTAGGAAGGCGGCCG |
| | CTCGAGCATGCATCTAGA |
| 255 | Optimized sequence; containing T7 polymerase |
| | site, AfeI and Xba restriction site |
| | TAATACGACTCACTATA |
| | GGGAAATAAGAGAGAAAAGAAGAGTAAGAAGAAATATAAGAGCCA |
| | CCATGGCCGGTCCCGCGACCCAAAGCCCCATGAAACTTATGGCCC |
| | TGCAGTTGCTGCTTTGGCACTCGGCCCTCTGGACAGTCCAAGAAG |
| | CGACTCCTCTCGGACCTGCCTCATCGTTGCCGCAGTCATTCCTTT |
| | TGAAGTGTCTGGAGCAGGTGCGAAAGATTCAGGGCGATGGAGCCG |
| | CACTCCAAGAGAAGCTCTGCGCGACATACAAACTTTGCCATCCCG |
| | AGGAGCTCGTACTGCTCGGGCACAGCTTGGGGATTCCCTGGGCTC |
| | CTCTCTCGTCCTGTCCGTCGCAGGCTTTGCAGTTGGCAGGGTGCC |
| | TTTCCCAGCTCCACTCCGGTTTGTTCTTGTATCAGGGACTGCTGC |
| | AAGCCCTTGAGGGAATCTCGCCAGAATTGGGCCCGACGCTGGACA |
| | CGTTGCAGCTCGACGTGGCGGATTTCGCAACAACCATCTGGCAGC |
| | AGATGGAGGAACTGGGGATGGCACCCGCGCTGCAGCCCACGCAGG |
| | GGGCAATGCCGGCCTTTGCGTCCGCGTTTCAGCGCAGGGCGGGTG |
| | GAGTCCTCGTAGCGAGCCACCTTCAATCATTTTTGGAAGTCTCGT |
| | ACCGGGTGCTGAGACATCTTGCGCAGCCGTGA |
| | AGCGCTGCCTTCTGCGGGGCTTGCCTTCTGGCCATGCCCTTCTTC |
| | TCTCCCTTGCACCTGTACCTCTTGGTCTTTGAATAAAGCCTGAGT |
| | AGGAAGGCGGCCGCTCGAGCATGCATCTAGA |
| 256 | mRNA sequence (transcribed) |
| | GGAAAUAAGAGAGAAAAGAAGAGUAAGAAGAAAUAUAAGAGCCAC |
| | C |
| | AUGGCCGGUCCCGCGACCCAAAGCCCCAUGAAACUUAUGGCCCUG |
| | CAGUUGCUGCUUUGGCACUCGGCCCUCUGGACAGUCCAAGAAGCG |
| | ACUCCUCUCGGACCUGCCUCAUCGUUGCCGCAGUCAUUCCUUUUG |
| | AAGUGUCUGGAGCAGGUGCGAAAGAUUCAGGGCGAUGGAGCCGCA |
| | CUCCAAGAGAAGCUCUGCGCGACAUACAAACUUUGCCAUCCCGAG |
| | GAGCUCGUACUGCUCGGGCACAGCUUGGGGAUUCCCUGGGCUCCU |
| | CUCUCGUCCUGUCCGUCGCAGGCUUUGCAGUUGGCAGGGUGCCUU |
| | UCCCAGCUCCACUCCGGUUUGUUCUUGUAUCAGGGACUGCUGCAA |
| | GCCCUUGAGGGAAUCUCGCCAGAAUUGGGCCCGACGCUGGACACG |
| | UUGCAGCUCGACGUGGCGGAUUUCGCAACAACCAUCUGGCAGCAG |
| | AUGGAGGAACUGGGGAUGGCACCCGCGCUGCAGCCCACGCAGGGG |
| | GCAAUGCCGGCCUUUGCGUCCGCGUUUCAGCGCAGGGCGGGUGGA |
| | GUCCUCGUAGCGAGCCACCUUCAAUCAUUUUUGGAAGUCUCGUAC |
| | CGGGUGCUGAGACAUCUUGCGCAGCCGUGA |
| | AGCGCUGCCUUCUGCGGGGCUUGCCUUCUGGCCAUGCCCUUCUUC |
| | UCUCCCUUGCACCUGUACCUCUUGGUCUUUGAAUAAAGCCUGAGU |
| | AGGA |
| | AG |

### Example 2

### PCR for cDNA Production

[0938] PCR procedures for the preparation of cDNA is performed using 2×KAPA HiFi™ HotStart ReadyMix by Kapa Biosystems (Woburn, Mass.). This system includes 2×KAPA ReadyMix12.5 μl; Forward Primer (10 uM) 0.75 μl; Reverse Primer (10 uM) 0.75 μl; Template cDNA 100 ng; and dH₂O diluted to 25.0 μl. The reaction conditions are at 95° C. for 5 min. and 25 cycles of 98° C. for 20 sec, then 58° C. for 15 sec, then 72° C. for 45 sec, then 72° C. for 5 min. then 4° C. to termination.

[0939] The reverse primer of the instant invention incorporates a poly-T₁₂₀ for a poly-A₁₂₀ in the mRNA. Other reverse primers with longer or shorter poly(T) tracts can be used to adjust the length of the poly(A) tail in the mRNA.

[0940] The reaction is cleaned up using Invitrogen's PureLink™ PCR Micro Kit (Carlsbad, Calif.) per manufacturer's instructions (up to 5 μg). Larger reactions will require a cleanup using a product with a larger capacity. Following the cleanup, the cDNA is quantified using the NanoDrop and analyzed by agarose gel electrophoresis to confirm the cDNA is the expected size. The cDNA is then submitted for sequencing analysis before proceeding to the in vitro transcription reaction.

### Example 3

### In Vitro Transcription

[0941] The in vitro transcription reaction generates mRNA containing modified nucleotides or modified RNA. The input nucleotide triphosphate (NTP) mix is made in-house using natural and un-natural NTPs.

[0942] A typical in vitro transcription reaction includes the following:

| | | | |
|---|---|---|---|
| 1. | Template cDNA | 1.0 | μg |
| 2. | 10× transcription buffer (400 mM Tris-HCl pH 8.0, | 2.0 | μl |
| | 190 mM MgCl2, 50 mM DTT, 10 nM Spermidine) | | |
| 3. | Custom NTPs (25 mM each) | 7.2 | μl |
| 4. | RNase Inhibitor | 20 | U |
| 5. | T7 RNA polymerase | 3000 | U |

| | | |
|---|---|---|
| 6. | dH₂0 | Up to 20.0 μl. and |
| 7. | Incubation at 37° C. for 3 hr-5 hrs. | |

[0943] The crude IVT mix may be stored at 4° C. overnight for cleanup the next day. 1 U of RNase-free DNase is then used to digest the original template. After 15 minutes of incubation at 37° C., the mRNA is purified using Ambion's MEGAclear™ Kit (Austin, Tex.) following the manufacturer's instructions. This kit can purify up to 500 μg of RNA. Following the cleanup, the RNA is quantified using the NanoDrop and analyzed by agarose gel electrophoresis to confirm the RNA is the proper size and that no degradation of the RNA has occurred.

### Example 4

### Enzymatic Capping of mRNA

[0944] Capping of the mRNA is performed as follows where the mixture includes: IVT RNA 60 μg-180 μg and dH₂O up to 72 μl. The mixture is incubated at 65° C. for 5 minutes to denature RNA, then transfer immediately to ice.

[0945] The protocol then involves the mixing of 10× Capping Buffer (0.5 M Tris-HCl (pH 8.0), 60 mM KCl, 12.5 mM MgCl2) (10.0 μl); 20 mM GTP (5.0 μl); 20 mM S-Adenosyl Methionine (2.5 IA); RNase Inhibitor (100 U); 2′-O-Methyltransferase (400U); Vaccinia capping enzyme (Guanylyl transferase) (40 U); dH₂O (Up to 28 μl); and incubation at 37° C. for 30 minutes for 60 μg RNA or up to 2 hours for 180 μg of RNA.

[0946] The mRNA is then purified using Ambion's MEGAclear™ Kit (Austin, Tex.) following the manufacturer's instructions. Following the cleanup, the RNA is quantified using the NanoDrop (ThermoFisher, Waltham, Mass.) and analyzed by agarose gel electrophoresis to confirm the RNA is the proper size and that no degradation of the RNA has occurred. The RNA product may also be sequenced by running a reverse-transcription-PCR to generate the cDNA for sequencing.

### Example 5

### PolyA Tailing Reaction

[0947] Without a poly-T in the cDNA, a poly-A tailing reaction must be performed before cleaning the final product. This is done by mixing Capped IVT RNA (100 μl); RNase Inhibitor (20 U); 10× Tailing Buffer (0.5 M Tris-HCl (pH 8.0), 2.5 M NaCl, 100 mM MgCl2)(12.0 μl); 20 mM ATP (6.0 μl); Poly-A Polymerase (20 U); dH₂O up to 123.5 μl and incubation at 37° C. for 30 min. If the poly-A tail is already in the transcript, then the tailing reaction may be skipped and proceed directly to cleanup with Ambion's MEGAclear™ kit (up to 500 μg). Poly-A Polymerase is preferably a recombinant enzyme expressed in yeast.

### Example 6

### Enzymatic vs. Chemical Caps

### Exemplary Capping Structures

[0948] 5′-capping of modified RNA may be completed concomitantly during the in vitro-transcription reaction using the following chemical RNA cap analogs to generate the 5′-guanosine cap structure according to manufacturer protocols: 3′-O-Me-m7G(5)ppp(5′)G; G(5′)ppp(5′)A; G(5′)ppp(5′)G; m7G(5′)ppp(5′)A; m7G(5′)ppp(5′)G (New England BioLabs, Ipswich, Mass.). 5′-capping of modified RNA may be completed post-transcriptionally using a Vaccinia Virus Capping Enzyme to generate the “Cap 0” structure: m7G(5′)ppp(5′)G (New England BioLabs, Ipswich, Mass.). Cap 1 structure may be generated using both Vaccinia Virus Capping Enzyme and a 2′-O methyl-transferase to generate: m7G(5′)ppp(5′)G-2′-O-methyl. Cap 2 structure may be generated from the Cap 1 structure followed by the 2′-O-methylation of the 5′-antepenultimate nucleotide using a 2′-O methyl-transferase. Cap 3 structure may be generated from the Cap 2 structure followed by the 2′-O-methylation of the 5′-preantepenultimate nucleotide using a 2′-0 methyl-transferase. Enzymes are preferably derived from a recombinant source.

[0949] When transfected into mammalian cells, the modified mRNAs may have a stability of between 12-18 hours or more than 18 hours, e.g., 24, 36, 48, 60, 72 or greater than 72 hours.

### Example 7

### Chemical Cap vs. Enzymatically-Derived Cap Protein Expression Assay

[0950] Synthetic mRNAs encoding human G-CSF containing the ARCA cap analog or the Cap1 structure can be transfected into human primary keratinocytes at equal concentrations. 6, 12, 24 and 36 hours post-transfection the amount of G-CSF secreted into the culture medium can be assayed by ELISA. Synthetic mRNAs that secrete higher levels of G-CSF into the medium would correspond to a synthetic mRNA with a higher translationally-competent Cap structure.

### Example 8

### Chemical Cap vs. Enzymatically-Derived Cap Purity Analysis

[0951] Synthetic mRNAs encoding human G-CSF containing the ARCA cap analog or the Cap1 structure crude synthesis products can be compared for purity using denaturing Agarose-Urea gel electrophoresis or HPLC analysis. Synthetic mRNAs with a single, consolidated band by electrophoresis correspond to the higher purity product compared to a synthetic mRNA with multiple bands or streaking bands. Synthetic mRNAs with a single HPLC peak would also correspond to a higher purity product. The capping reaction with a higher efficiency would provide a more pure mRNA population.

### Example 9

### Chemical Cap vs. Enzymatically-Derived Cap Cytokine Analysis

[0952] Synthetic mRNAs encoding human G-CSF containing the ARCA cap analog or the Cap1 structure can be transfected into human primary keratinocytes at multiple concentrations. 6, 12, 24 and 36 hours post-transfection the amount of pro-inflammatory cytokines such as TNF-alpha and IFN-beta secreted into the culture medium can be assayed by ELISA. Synthetic mRNAs that secrete higher levels of pro-inflammatory cytokines into the medium would correspond to a synthetic mRNA containing an immune-activating cap structure.

### Example 10

### Chemical Cap vs. Enzymatically-Derived Cap Capping Reaction Efficiency

[0953] Synthetic mRNAs encoding human G-CSF containing the ARCA cap analog or the Cap1 structure can be analyzed for capping reaction efficiency by LC-MS after capped mRNA nuclease treatment. Nuclease treatment of capped mRNAs would yield a mixture of free nucleotides and the capped 5′-5-triphosphate cap structure detectable by LC-MS. The amount of capped product on the LC-MS spectra can be expressed as a percent of total mRNA from the reaction and would correspond to capping reaction efficiency. The cap structure with a higher capping reaction efficiency would have a higher amount of capped product by LC-MS.

### Example 11

### Agarose Gel Electrophoresis of Modified RNA or RT PCR Products

[0954] Individual modRNAs (200-400 ng in a 20 μl volume) or reverse transcribed PCR products (200-400 ng) are loaded into a well on a non-denaturing 1.2% Agarose E-Gel (Invitrogen, Carlsbad, Calif.) and run for 12-15 minutes according to the manufacturer protocol.

### Example 12

### Nanodrop Modified RNA Quantification and UV Spectral Data

[0955] Modified RNAs in TE buffer (1 μl) are used for Nanodrop UV absorbance readings to quantitate the yield of each modified RNA from an in vitro transcription reaction.

### Example 13

### Formulation of Modified mRNA Using Lipidoids

[0956] Modified mRNAs (mRNAs) were made using standard laboratory methods and materials for in vitro transcription with the exception that the nucleotide mix contained modified nucleotides. The open reading frame (ORF) of the gene of interest is flanked by a 5′ untranslated region (UTR) containing a strong Kozak translational initiation signal and an alpha-globin 3′ UTR terminating with an oligo(dT) sequence for templated addition of a polyA tail for mRNAs not incorporating Adenosine analogs. Adenosine-containing mRNAs were synthesized without an oligo (dT) sequence to allow for post-transcription poly (A) polymerase poly-(A) tailing. In some cases, the mRNAs were modified by incorporating chemically modified nucleotides from the list indicated in Table 2 during the in vitro transcription with 100% replacement of the corresponding natural nucleotide or partial replacement of the corresponding natural nucleotide at the indicated percentage.

[0957] Modified mRNA are formulated for in vitro experiments by mixing the mRNA with the lipidoid at a set ratio prior to addition to cells. In vivo formulation requires the addition of extra ingredients to facilitate circulation throughout the body. To test the ability of these lipidoids to form particles suitable for in vivo work, a standard formulation process used for siRNA-lipidoid formulations was used as a starting point. Initial mRNA-lipidoid formulations consist of particles composed of 42% lipidoid, 48% cholesterol and 10% PEG, with further optimization of ratios possible. After formation of the particle, mRNA was added and allowed to integrate with the complex. The encapsulation efficiency was determined using a standard dye exclusion assays.

### Example 14

### In Vitro Expression of Modified RNA-Encoded Proteins in Human Cells Using Lipidoid Formulations

[0958] RNA transfections can be carried out using various different lipidoids, including, but not limited to, 98N12-5, C12-200, and MD1. The 98N12-5 (Akinc et al., Nat. Biotechnol. 2008 26:561-569; Frank-Kamenetsky et al., Proc Natl Acad Sci USA. 2008 105:11915-11920; Akinc et al., Mol. Ther. 2009 17:872-879; herein incorporated by reference in their entirety), C12-200 (Love et al., Proc Natl Acad Sci USA. 2010 107:1864-1869), and MD1 (Alnylam Oligonucleotide Therapeutic Society 2011 poster presentation, http://www.alnylam.com/capella/wp-content/uploads/2011/09/ALNY-OTS-NextGenLNPs-Sep20111.pdf; herein incorporated by reference in their entirety), have been demonstrated to be efficient at siRNA delivery, but are untested using single stranded mRNA.

[0959] The ratio of mRNA to lipidoid used to test for in vitro transfection is tested empirically at different lipidoid:mRNA ratios. Previous work using siRNA and lipidoids have utilized 2.5:1, 5:1, 10:1, and 15:1 lipidoid:siRNA wt:wt ratios. Given the longer length of mRNA relative to siRNA, a lower wt:wt ratio of lipidoid to mRNA may be effective. In addition, for comparison mRNA were also formulated using RNAiMax (Invitrogen) or TRANSIT-mRNA (Minis Bio) cationic lipid delivery vehicles. The ability of lipidoid-formulated Luciferase, GFP, G-CSF, and EPO mRNA to express the desired protein product can be confirmed by luminescence for luciferase expression, flow cytometry for GFP expression, and by ELISA for G-CSF and Erythropoietin (EPO) secretion.

### Example 15

### In Vivo Expression of Modified RNA-Encoded Proteins Following Intravenous Injection Using Lipidoid Formulations

[0960] Systemic intravenous administration of the formulations may be created using various different lipidoids, including 98N12-5, C12-200, and MD1. The 98N12-5 (Akinc et al., Nat. Biotechnol. 2008 26:561-569; Frank-Kamenetsky et al., Proc Natl Acad Sci USA. 2008 105:11915-11920; Akinc et al., Mol. Ther. 2009 17:872-879), C12-200 (Love et al., Proc Natl Acad Sci USA. 2010 107:1864-1869; Leuschner et al., Nat Biotechnol 2011 29:1005-1010), and MD1 (Alnylam Oligonucleotide Therapeutic Society 2011 poster presentation, http://www.alnylam.com/capella/wp-content/uploads/2011/09/ALNY-OTS-NextGenLNPs-Sep20111.pdf), have all been demonstrated to be efficient at siRNA in vivo delivery and mRNA silencing, but are untested using single stranded mRNA.

[0961] Lipidoid formulations containing mRNA can be injected intravenously into animals. The expression of the mRNA-encoded proteins can be assessed in blood and other organs samples such as the liver and spleen collected from the animal. Conducting single dose intravenous studies will also allow an assessment of the magnitude, dose responsiveness, and longevity of expression of the desired product. In a study, lipidoid based formulations 98N12-5, C12-200, MD1 and other lipidoid-based formulations, may be used to deliver luciferase, green fluorescent protein (GFP), human G-CSF, or human Erythropoietin (EPO) mRNA into the animal. After formulation of mRNA with the lipidoid formulations as described previously, animals are divided into groups to receive either a saline formulation, or a lipidoid-formulation containing one of four different mRNA selected from luciferase, GFP, human G-CSF and human EPO. Prior to injection into the animal, mRNA-containing lipidoid formulations are diluted in PBS. Animals are then administered a single dose of formulated mRNA ranging from a dose of 10 mg/kg to doses as low as 1 ng/kg, with a preferred range to be 10 mg/kg to 100 ng/kg, depending on the amount of mRNA injected per animal body weight. If the animal is a mouse, the volume of an intravenous injection of the lipidoid formulation is a maximum of 0.2 ml for a 20 gram mouse. At various points in time following the administration of the mRNA-lipidoid, serum, tissues, and tissue lysates can be obtained and the level of the mRNA-encoded product determined. The ability of lipidoid-formulated Luciferase, GFP, G-CSF, and EPO mRNA to express the desired protein product can be confirmed by luminescence for luciferase expression, flow cytometry for GFP expression, and by ELISA for G-CSF and Erythropoietin (EPO) secretion.

[0962] Additional studies for a multi-dose regimen can also be performed to determine the maximal expression using mRNA, to evaluate the saturability of the mRNA-driven expression (achieved by giving a control and active mRNA formulation in parallel or in sequence), and to determine the feasibility of repeat drug administration (by giving mRNA in doses separated by weeks or months and then determining whether expression level is affected by factors such as immunogenicity). In addition to detection of the expressed protein product, an assessment of the physiological function of proteins such as G-CSF and EPO can also be determined through analyzing samples from the animal tested and detecting increases in granulocyte and red blood cell counts, respectively.

### Example 16

### In Vivo Expression of Modified RNA-Encoded Proteins Following Intramuscular and/or Subcutaneous Injection Using Lipidoid Formulations

[0963] The use of lipidoid formulations to deliver oligonucleotides, including siRNA, via an intramuscular route or a subcutaneous route of injection needs to be evaluated as it has not been previously reported. The intramuscular and/or subcutaneous injection of mRNA-containing lipidoid formulations will be evaluated to determine if they are capable to produce both localized and systemic expression of the desired proteins.

[0964] Lipidoid formulations containing mRNA can be injected intramuscularly and/or subcutaneously into animals. The expression of mRNA-encoded proteins can be assessed both within the muscle or subcutaneous tissue and systemically in blood and other organs such as the liver and spleen. The ability of 98N12-5, C12-200, and MD1-based lipidoid formulations, and possibly other lipidoid-based formulations, to deliver either luciferase, green fluorescent protein (GFP), human G-CSF, or human Erythropoietin (EPO) mRNA will be evaluated. Conducting single dose studies will also allow an assessment of the magnitude, dose responsiveness, and longevity of expression of the desired product. After the formulation of mRNA with the lipidoid formulations, as described previously, animals will be divided into groups receiving either a saline formulation, or a lipidoid-formulation containing one of four different mRNA selected from, luciferase, GFP, human G-CSF, human EPO. Prior to injection, mRNA-containing lipidoid formulations are diluted in PBS and animals administered a single intramuscular dose of formulated mRNA ranging from 50 mg/kg to doses as low as 1 ng/kg with a preferred range to be 10 mg/kg to 100 ng/kg. If the animal tested is a mouse the maximum dose can be roughly 1 mg mRNA or as low as 0.02 ng mRNA if administered once into the hind limb. Likewise for subcutaneous administration, mRNA-containing lipidoid formulations are diluted in PBS before the animals are administered a single subcutaneous dose of formulated mRNA ranging from 400 mg/kg- to doses as low as 1 ng/kg. A preferred dosage range may be 80 mg/kg to 100 ng/kg. If the animal tested is a mouse, the maximum dose administered can be roughly 8 mg mRNA or as low as 0.02 ng mRNA if the dose is administered once subcutaneously.

[0965] It is preferred that the volume of a single intramuscular injection is maximally 0.025 ml and of a single subcutaneous injection is maximally 0.2 ml for a 20 gram mouse. The dose of the mRNA administered to the animal is calculated depending on the body weight of the animal. At various points in time points following the administration of the mRNA-lipidoid, serum, tissues, and tissue lysates can be obtained and the level of the mRNA-encoded product determined. The ability of lipidoid-formulated Luciferase, GFP, G-CSF, and EPO mRNA to express the desired protein product can be confirmed by luminescence for luciferase expression, flow cytometry for GFP expression, and by ELISA for G-CSF and Erythropoietin (EPO) secretion.

[0966] Additional studies for a multi-dose regimen can also be performed to determine the maximal expression using mRNA, to evaluate the saturability of the mRNA-driven expression (achieved by giving a control and active mRNA formulation in parallel or in sequence), and to determine the feasibility of repeat drug administration (by giving mRNA in doses separated by weeks or months and then determining whether expression level is affected by factors such as immunogenicity). Studies utilizing multiple subcutaneous or intramuscular injection sites at one time point, can also be utilized to further increase mRNA drug exposure and improve protein production. In addition to detection of the expressed protein product, an assessment of the physiological function of proteins such as G-CSF and EPO can also be determined through analyzing samples from the animal tested and detecting increases in granulocyte and red blood cell counts, respectively.

### Example 17

### In Vitro Transfection of VEGF-A

[0967] Human vascular endothelial growth factor-isoform A (VEGF-A) modified mRNA (mRNA sequence shown in SEQ ID NO: 257; poly-A tail of approximately 160 nucleotides not shown in sequence; 5′ cap, Cap1) was transfected via reverse transfection in Human Keratinocyte cells in 24 multi-well plates. Human Keratinocytes cells were grown in EPILIFE® medium with Supplement S7 from Invitrogen (Carlsbad, Calif.) until they reached a confluence of 50-70%. The cells were transfected with 0, 46.875, 93.75, 187.5, 375, 750, and 1500 ng of modified mRNA (mRNA) encoding VEGF-A which had been complexed with RNAIMAX™ from Invitrogen (Carlsbad, Calif.). The RNA:RNAIMAX™ complex was formed by first incubating the RNA with Supplement-free EPILIFE® media in a 5× volumetric dilution for 10 minutes at room temperature. In a second vial, RNAIMAX™ reagent was incubated with Supplement-free EPILIFE® Media in a 10× volumetric dilution for 10 minutes at room temperature. The RNA vial was then mixed with the RNAIMAX™ vial and incubated for 20-30 minutes at room temperature before being added to the cells in a drop-wise fashion.

[0968] The fully optimized mRNA encoding VEGF-A transfected with the Human Keratinocyte cells included modifications during translation such as natural nucleoside triphosphates (NTP), pseudouridine at each uridine site and 5-methylcytosine at each cytosine site (pseudo-U/5mC), and N1-methyl-pseudouridine at each uridine site and 5-methylcytosine at each cytosine site (N-1-methyl-Pseudo-U/5mC). Cells were transfected with the mRNA encoding VEGF-A and secreted VEGF-A concentration (pg/ml) in the culture medium was measured at 6, 12, 24, and 48 hours post-transfection for each of the concentrations using an ELISA kit from Invitrogen (Carlsbad, Calif.) following the manufacturers recommended instructions. These data, shown in Table 6, show that modified mRNA encoding VEGF-A is capable of being translated in Human Keratinocyte cells and that VEGF-A is transported out of the cells and released into the extracellular environment.

TABLE 6
VEGF-A Dosing and Protein Secretion

| | | | | |
|---|---|---|---|---|
| | 6 hours | 12 hours | 24 hours | 48 hours |
| Dose (ng) | (pg/ml) | (pg/ml) | (pg/ml) | (pg/ml) |

VEGF-A Dose Containing Natural NTPs

| | | | | |
|---|---|---|---|---|
| 46.875 | 10.37 | 18.07 | 33.90 | 67.02 |
| 93.75 | 9.79 | 20.54 | 41.95 | 65.75 |
| 187.5 | 14.07 | 24.56 | 45.25 | 64.39 |
| 375 | 19.16 | 37.53 | 53.61 | 88.28 |
| 750 | 21.51 | 38.90 | 51.44 | 61.79 |
| 1500 | 36.11 | 61.90 | 76.70 | 86.54 |

VEGF-A Dose Containing Pseudo-U/5mC

| | | | | |
|---|---|---|---|---|
| 46.875 | 10.13 | 16.67 | 33.99 | 72.88 |
| 93.75 | 11.00 | 20.00 | 46.47 | 145.61 |
| 187.5 | 16.04 | 34.07 | 83.00 | 120.77 |
| 375 | 69.15 | 188.10 | 448.50 | 392.44 |
| 750 | 133.95 | 304.30 | 524.02 | 526.58 |
| 1500 | 198.96 | 345.65 | 426.97 | 505.41 |

VEGF-A Dose Containing N1-methyl-Pseudo-U/5mC

| | | | | |
|---|---|---|---|---|
| 46.875 | 0.03 | 6.02 | 27.65 | 100.42 |
| 93.75 | 12.37 | 46.38 | 121.23 | 167.56 |
| 187.5 | 104.55 | 365.71 | 1025.41 | 1056.91 |
| 375 | 605.89 | 1201.23 | 1653.63 | 1889.23 |
| 750 | 445.41 | 1036.45 | 1522.86 | 1954.81 |
| 1500 | 261.61 | 714.68 | 1053.12 | 1513.39 |

### Example 18

### In Vitro Expression of VEGF Modified mRNA

[0969] HEK293 cells were transfected with modified mRNA (mRNA) VEGF-A (mRNA sequence shown in SEQ ID NO: 257; polyA tail of approximately 160 nucleotides not shown in sequence; 5′ cap, Cap1; fully modified with 5-methylcytosine and pseudouridine) which had been complexed with Lipofectamine-2000 from Invitrogen (Carlsbad, Calif.) at the concentration shown in Table 7. The protein expression was detected by ELISA and the protein (pg/ml) is shown in Table 7.

TABLE 7
Protein Expression

| | Amount Transfected | | | | | | | |
|---|---|---|---|---|---|---|---|---|
| | 10 | 2.5 | 625 | 156 | 39 | 10 | 2 | 610 |
| | ng | ng | pg | pg | pg | pg | pg | fg |
| Protein | 10495 | 10038 | 2321.23 | 189.6 | 0 | 0 | 0 | 0 |
| (pg/ml) | | | | | | | | |

### Example 19

### Directed SAR of Pseudouridine and N1-methyl PseudoUridine

[0970] With the recent focus on the pyrimidine nucleoside pseudouridine, a series of structure-activity studies were designed to investigate mRNA containing modifications to pseudouridine or N1-methyl-pseudourdine.

[0971] The study was designed to explore the effect of chain length, increased lipophilicity, presence of ring structures, and alteration of hydrophobic or hydrophilic interactions when modifications were made at the N1 position, C6 position, the 2-position, the 4-position and on the phosphate backbone. Stability is also investigated.

[0972] To this end, modifications involving alkylation, cycloalkylation, alkyl-cycloalkylation, arylation, alkyl-arylation, alkylation moieties with amino groups, alkylation moieties with carboxylic acid groups, and alkylation moieties containing amino acid charged moieties are investigated. The degree of alkylation is generally C₁-C₆. Examples of the chemistry modifications include those listed in Table 8 and Table 9.

TABLE 8
Pseudouridine and N1-methyl Pseudo Uridine SAR

| | Compound | Naturally |
|---|---|---|
| Chemistry Modification | # | occuring |
| N1-Modifications | | |
| N1-Ethyl-pseudo-UTP | 1 | N |
| N1-Propyl-pseudo-UTP | 2 | N |
| N1-iso-propyl-pseudo-UTP | 3 | N |
| N1-(2,2,2-Trifluoroethyl)-pseudo-UTP | 4 | N |
| N1-Cyclopropyl-pseudo-UTP | 5 | N |
| N1-Cyclopropylmethyl-pseudo-UTP | 6 | N |
| N1-Phenyl-pseudo-UTP | 7 | N |
| N1-Benzyl-pseudo-UTP | 8 | N |
| N1-Aminomethyl-pseudo-UTP | 9 | N |
| Pseudo-UTP-N1-2-ethanoic acid | 10 | N |
| N1-(3-Amino-3-carboxypropyl)pseudo-UTP | 11 | N |
| N1-Methyl-3-(3-amino-3-carboxypropyl) | 12 | Y |
| pseudo-UTP | | |
| C-6 Modifications | | |
| 6-Methyl-pseudo-UTP | 13 | N |
| 6-Trifluoromethyl-pseudo-UTP | 14 | N |
| 6-Methoxy-pseudo-UTP | 15 | N |
| 6-Phenyl-pseudo-UTP | 16 | N |
| 6-Iodo-pseudo-UTP | 17 | N |
| 6-Bromo-pseudo-UTP | 18 | N |
| 6-Chloro-pseudo-UTP | 19 | N |
| 6-Fluoro-pseudo-UTP | 20 | N |
| 2- or 4-position Modifications | | |
| 4-Thio-pseudo-UTP | 21 | N |
| 2-Thio-pseudo-UTP | 22 | N |
| Phosphate backbone Modifications | | |
| Alpha-thio-pseudo-UTP | 23 | N |
| N1-Me-alpha-thio-pseudo-UTP | 24 | N |

TABLE 9
Pseudouridine and N1-methyl Pseudo Uridine SAR

| | Compound | Naturally |
|---|---|---|
| Chemistry Modification | # | occuring |
| N1-Methyl-pseudo-UTP | 1 | Y |
| N1-Butyl-pseudo-UTP | 2 | N |
| N1-tert-Butyl-pseudo-UTP | 3 | N |
| N1-Pentyl-pseudo-UTP | 4 | N |
| N1-Hexyl-pseudo-UTP | 5 | N |
| N1-Trifluoromethyl-pseudo-UTP | 6 | Y |
| N1-Cyclobutyl-pseudo-UTP | 7 | N |
| N1-Cyclopentyl-pseudo-UTP | 8 | N |
| N1-Cyclohexyl-pseudo-UTP | 9 | N |
| N1-Cycloheptyl-pseudo-UTP | 10 | N |
| N1-Cyclooctyl-pseudo-UTP | 11 | N |
| N1-Cyclobutylmethyl-pseudo-UTP | 12 | N |
| N1-Cyclopentylmethyl-pseudo-UTP | 13 | N |
| N1-Cyclohexylmethyl-pseudo-UTP | 14 | N |
| N1-Cycloheptylmethyl-pseudo-UTP | 15 | N |
| N1-Cyclooctylmethyl-pseudo-UTP | 16 | N |
| N1-p-tolyl-pseudo-UTP | 17 | N |
| N1-(2,4,6-Trimethyl-phenyl)pseudo-UTP | 18 | N |
| N1-(4-Methoxy-phenyl)pseudo-UTP | 19 | N |
| N1-(4-Amino-phenyl)pseudo-UTP | 20 | N |
| N1(4-Nitro-phenyl)pseudo-UTP | 21 | N |
| Pseudo-UTP-N1-p-benzoic acid | 22 | N |
| N1-(4-Methyl-benzyl)pseudo-UTP | 24 | N |
| N1-(2,4,6-Trimethyl-benzyl)pseudo-UTP | 23 | N |
| N1-(4-Methoxy-benzyl)pseudo-UTP | 25 | N |
| N1-(4-Amino-benzyl)pseudo-UTP | 26 | N |
| N1-(4-Nitro-benzyl)pseudo-UTP | 27 | N |
| Pseudo-UTP-N1-methyl-p-benzoic acid | 28 | N |
| N1-(2-Amino-ethyl)pseudo-UTP | 29 | N |
| N1-(3-Amino-propyl)pseudo-UTP | 30 | N |
| N1-(4-Amino-butyl)pseudo-UTP | 31 | N |
| N1-(5-Amino-pentyl)pseudo-UTP | 32 | N |
| N1-(6-Amino-hexyl)pseudo-UTP | 33 | N |
| Pseudo-UTP-N1-3-propionic acid | 34 | N |
| Pseudo-UTP-N1-4-butanoic acid | 35 | N |
| Pseudo-UTP-N1-5-pentanoic acid | 36 | N |
| Pseudo-UTP-N1-6-hexanoic acid | 37 | N |
| Pseudo-UTP-N1-7-heptanoic acid | 38 | N |
| N1-(2-Amino-2-carboxyethyl)pseudo-UTP | 39 | N |
| N1-(4-Amino-4-carboxybutyl)pseudo-UTP | 40 | N |
| N3-Alkyl-pseudo-UTP | 41 | N |
| 6-Ethyl-pseudo-UTP | 42 | N |
| 6-Propyl-pseudo-UTP | 43 | N |
| 6-iso-Propyl-pseudo-UTP | 44 | N |
| 6-Butyl-pseudo-UTP | 45 | N |
| 6-tert-Butyl-pseudo-UTP | 46 | N |
| 6-(2,2,2-Trifluoroethyl)-pseudo-UTP | 47 | N |
| 6-Ethoxy-pseudo-UTP | 48 | N |
| 6-Trifluoromethoxy-pseudo-UTP | 49 | N |
| 6-Phenyl-pseudo-UTP | 50 | N |
| 6-(Substituted-Phenyl)-pseudo-UTP | 51 | N |
| 6-Cyano-pseudo-UTP | 52 | N |
| 6-Azido-pseudo-UTP | 53 | N |
| 6-Amino-pseudo-UTP | 54 | N |
| 6-Ethylcarboxylate-pseudo-UTP | 54b | N |
| 6-Hydroxy-pseudo-UTP | 55 | N |
| 6-Methylamino-pseudo-UTP | 55b | N |
| 6-Dimethylamino-pseudo-UTP | 57 | N |
| 6-Hydroxyamino-pseudo-UTP | 59 | N |
| 6-Formyl-pseudo-UTP | 60 | N |
| 6-(4-Morpholino)-pseudo-UTP | 61 | N |
| 6-(4-Thiomorpholino)-pseudo-UTP | 62 | N |
| N1-Me-4-thio-pseudo-UTP | 63 | N |
| N1-Me-2-thio-pseudo-UTP | 64 | N |
| 1,6-Dimethyl-pseudo-UTP | 65 | N |
| 1-Methyl-6-trifluoromethyl-pseudo-UTP | 66 | N |
| 1-Methyl-6-ethyl-pseudo-UTP | 67 | N |
| 1-Methyl-6-propyl-pseudo-UTP | 68 | N |
| 1-Methyl-6-iso-propyl-pseudo-UTP | 69 | N |
| 1-Methyl-6-butyl-pseudo-UTP | 70 | N |
| 1-Methyl-6-tert-butyl-pseudo-UTP | 71 | N |
| 1-Methyl-6-(2,2,2-Trifluoroethyl)pseudo-UTP | 72 | N |
| 1-Methyl-6-iodo-pseudo-UTP | 73 | N |
| 1-Methyl-6-bromo-pseudo-UTP | 74 | N |
| 1-Methyl-6-chloro-pseudo-UTP | 75 | N |
| 1-Methyl-6-fluoro-pseudo-UTP | 76 | N |
| 1-Methyl-6-methoxy-pseudo-UTP | 77 | N |
| 1-Methyl-6-ethoxy-pseudo-UTP | 78 | N |
| 1-Methyl-6-trifluoromethoxy-pseudo-UTP | 79 | N |
| 1-Methyl-6-phenyl-pseudo-UTP | 80 | N |
| 1-Methyl-6-(substituted phenyl)pseudo-UTP | 81 | N |
| 1-Methyl-6-cyano-pseudo-UTP | 82 | N |
| 1-Methyl-6-azido-pseudo-UTP | 83 | N |
| 1-Methyl-6-amino-pseudo-UTP | 84 | N |
| 1-Methyl-6-ethylcarboxylate-pseudo-UTP | 85 | N |
| 1-Methyl-6-hydroxy-pseudo-UTP | 86 | N |
| 1-Methyl-6-methylamino-pseudo-UTP | 87 | N |
| 1-Methyl-6-dimethylamino-pseudo-UTP | 88 | N |
| 1-Methyl-6-hydroxyamino-pseudo-UTP | 89 | N |
| 1-Methyl-6-formyl-pseudo-UTP | 90 | N |
| 1-Methyl-6-(4-morpholino)-pseudo-UTP | 91 | N |
| 1-Methyl-6-(4-thiomorpholino)-pseudo-UTP | 92 | N |
| 1-Alkyl-6-vinyl-pseudo-UTP | 93 | N |
| 1-Alkyl-6-allyl-pseudo-UTP | 94 | N |
| 1-Alkyl-6-homoallyl-pseudo-UTP | 95 | N |
| 1-Alkyl-6-ethynyl-pseudo-UTP | 96 | N |
| 1-Alkyl-6-(2-propynyl)-pseudo-UTP | 97 | N |
| 1-Alkyl-6-(1-propynyl)-pseudo-UTP | 98 | N |

### Example 20

### Incorporation of Naturally and Non-Naturally Occurring Nucleosides

[0973] Naturally and non-naturally occurring nucleosides are incorporated into mRNA encoding a polypeptide of interest. Examples of these are given in Tables 10 and 11. Certain commercially available nucleoside triphosphates (NTPs) are investigated in the polynucleotides of the invention. A selection of these are given in Table 11. The resultant mRNA are then examined for their ability to produce protein, induce cytokines, and/or produce a therapeutic outcome.

TABLE 10
Naturally and non-naturally occurring nucleosides

| | Compound | Naturally |
|---|---|---|
| Chemistry Modification | # | occuring |
| N4-Methyl-Cytosine | 1 | Y |
| N4,N4-Dimethyl-2′-OMe-Cytosine | 2 | Y |
| 5-Oxyacetic acid-methyl ester-Uridine | 3 | Y |
| N3-Methyl-pseudo-Uridine | 4 | Y |
| 5-Hydroxymethyl-Cytosine | 5 | Y |
| 5-Trifluoromethyl-Cytosine | 6 | N |
| 5-Trifluoromethyl-Uridine | 7 | N |
| 5-Methyl-amino-methyl-Uridine | 8 | Y |
| 5-Carboxy-methyl-amino-methyl-Uridine | 9 | Y |
| 5-Carboxymethylaminomethyl-2′-OMe-Uridine | 10 | Y |
| 5-Carboxymethylaminomethyl-2-thio-Uridine | 11 | Y |
| 5-Methylaminomethyl-2-thio-Uridine | 12 | Y |
| 5-Methoxy-carbonyl-methyl-Uridine | 13 | Y |
| 5-Methoxy-carbonyl-methyl-2′-OMe-Uridine | 14 | Y |
| 5-Oxyacetic acid-Uridine | 15 | Y |
| 3-(3-Amino-3-carboxypropyl)-Uridine | 16 | Y |
| 5-(carboxyhydroxymethyl)uridine methyl ester | 17 | Y |
| 5-(carboxyhydroxymethyl)uridine | 18 | Y |

TABLE 11
Non-naturally occurring nucleoside triphosphates

| | Compound | Naturally |
|---|---|---|
| Chemistry Modification | # | occuring |
| N1-Me-GTP | 1 | N |
| 2′-OMe-2-Amino-ATP | 2 | N |
| 2′-OMe-pseudo-UTP | 3 | Y |
| 2′-OMe-6-Me-UTP | 4 | N |
| 2′-Azido-2′-deoxy-ATP | 5 | N |
| 2′-Azido-2′-deoxy-GTP | 6 | N |
| 2′-Azido-2′-deoxy-UTP | 7 | N |
| 2′-Azido-2′-deoxy-CTP | 8 | N |
| 2′-Amino-2′-deoxy-ATP | 9 | N |
| 2′-Amino-2′-deoxy-GTP | 10 | N |
| 2′-Amino-2′-deoxy-UTP | 11 | N |
| 2′-Amino-2′-deoxy-CTP | 12 | N |
| 2-Amino-ATP | 13 | N |
| 8-Aza-ATP | 14 | N |
| Xanthosine-5′-TP | 15 | N |
| 5-Bromo-CTP | 16 | N |
| 2′-F-5-Methyl-2′-deoxy-UTP | 17 | N |
| 5-Aminoallyl-CTP | 18 | N |
| 2-Amino-riboside-TP | 19 | N |

### Example 21

### Incorporation of Modifications to the Nucleobase and Carbohydrate (Sugar)

[0974] Naturally and non-naturally occurring nucleosides are incorporated into mRNA encoding a polypeptide of interest. Commercially available nucleosides and NTPs having modifications to both the nucleobase and carbohydrate (sugar) are examined for their ability to be incorporated into mRNA and to produce protein, induce cytokines, and/or produce a therapeutic outcome. Examples of these nucleosides are given in Tables 22 and 23.

TABLE 22
Combination modifications

| | Compound |
|---|---|
| Chemistry Modification | # |
| 5-iodo-2′-fluoro-deoxyuridine | 1 |
| 5-iodo-cytidine | 6 |
| 2′-bromo-deoxyuridine | 7 |
| 8-bromo-adenosine | 8 |
| 8-bromo-guanosine | 9 |
| 2,2′-anhydro-cytidine hydrochloride | 10 |
| 2,2′-anhydro-uridine | 11 |
| 2′-Azido-deoxyuridine | 12 |
| 2-amino-adenosine | 13 |
| N4-Benzoyl-cytidine | 14 |
| N4-Amino-cytidine | 15 |
| 2′-O-Methyl-N4-Acetyl-cytidine | 16 |
| 2′Fluoro-N4-Acetyl-cytidine | 17 |
| 2′Fluor-N4-Bz-cytidine | 18 |
| 2′O-methyl-N4-Bz-cytidine | 19 |
| 2′O-methyl-N6-Bz-deoxyadenosine | 20 |
| 2′Fluoro-N6-Bz-deoxyadenosine | 21 |
| N2-isobutyl-guanosine | 22 |
| 2′Fluro-N2-isobutyl-guanosine | 23 |
| 2′O-methyl-N2-isobutyl-guanosine | 24 |

TABLE 23
Naturally occuring combinations

| | Compound | Naturally |
|---|---|---|
| Name | # | occurring |
| 5-Methoxycarbonylmethyl-2-thiouridine TP | 1 | Y |
| 5-Methylaminomethyl-2-thiouridine TP | 2 | Y |
| 5-Crbamoylmethyluridine TP | 3 | Y |
| 5-Carbamoylmethyl-2′-O-methyluridine TP | 4 | Y |
| 1-Methyl-3-(3-amino-3-carboxypropyl) | 5 | Y |
| pseudouridine TP | | |
| 5-Methylaminomethyl-2-selenouridine TP | 6 | Y |
| 5-Carboxymethyluridine TP | 7 | Y |
| 5-Methyldihydrouridine TP | 8 | Y |
| lysidine TP | 9 | Y |
| 5-Taurinomethyluridine TP | 10 | Y |
| 5-Taurinomethyl-2-thiouridine TP | 11 | Y |
| 5-(iso-Pentenylaminomethyl)uridine TP | 12 | Y |
| 5-(iso-Pentenylaminomethyl)-2-thiouridine TP | 13 | Y |
| 5-(iso-Pentenylaminomethyl)-2′-O- | 14 | Y |
| methyluridine TP | | |
| N4-Acetyl-2′-O-methylcytidine TP | 15 | Y |
| N4,2′-O-Dimethylcytidine TP | 16 | Y |
| 5-Formyl-2′-O-methylcytidine TP | 17 | Y |
| 2′-O-Methylpseudouridine TP | 18 | Y |
| 2-Thio-2′-O-methyluridine TP | 19 | Y |
| 3,2′-O-Dimethyluridine TP | 20 | Y |

In the tables “UTP” stands for uridine triphosphate, “GTP” stands for guanosine triphosphate, “ATP” stands for adenosine triphosphate, “CTP” stands for cytosine triphosphate, “TP” stands for triphosphate and “Bz” stands for benzyl.

### Example 22

### In Vitro VEGF PBMC Study

[0975] 500 ng of VEGF mRNA (SEQ ID NO: 257 polyA tail of approximately 160 nucleotides not shown in sequence; 5′ cap, Cap1) fully modified with 5-methylcytosine and pseudouridine (VEGF 5mC/pU), fully modified with 5-methylcytosine and N1-methylpseudouridine (VEGF 5mC/N1mpU) or unmodified (VEGF unmod) was transfected with 0.4 uL of Lipofectamine 2000 into peripheral blood mononuclear cells (PBMC) from three normal blood donors (D1, D2, and D3). Cells were also untreated for each donor as a control. The supernatant was harvested and run by ELISA 22 hours after transfection to determine the protein expression and cytokine induction. The expression of VEGF and IFN-alpha induction is shown in Table 24.

TABLE 24
Protein and Cytokine levels

| | VEGF Expression | | | IFN-alpha Induction | | |
|---|---|---|---|---|---|---|
| | (pg/ml) | | | (pg/ml) | | |
| | D1 | D2 | D3 | D1 | D2 | D3 |
| VEGF unmod | 2 | 0 | 0 | 5400 | 3537 | 4946 |
| VEGF 5 mC/pU | 424 | 871 | 429 | 145 | 294 | 106 |
| VEGF 5 mC/N1mpU | 5088 | 10331 | 6183 | 205 | 165 | 6 |

### Example 23

### In Vitro Expression of Modified mRNA

[0976] HEK293 cells were transfected with VEGF-A modified mRNA (mRNA sequence shown in SEQ ID NO: 257; polyA tail of approximately 160 nucleotides not shown in sequence; 5′ cap, Cap1; fully modified with 5-methylcytosine and pseudouridine) and HeLa cells were forward transfected with Transforming growth factor beta (TGF-beta) modified mRNA (mRNA sequence 258; poly A tail of approximately 160 nucleotides not shown in sequence; 5′ cap, Cap1; fully modified with 5-methylcytosine and pseudouridine) which had been complexed with Lipofectamine-2000 from Invitrogen (Carlsbad, Calif.) at the concentrations shown in Table 25 and 26. The protein expression was detected by ELISA and the protein (pg/ml) is also shown in Table 25 and 26. For TGF-beta a control of untreated cells and a mock transfection of Lipofectamine-2000 was also tested.

TABLE 25
VEGF-A Protein Expression

| | Amount Transfected | | | | | | | |
|---|---|---|---|---|---|---|---|---|
| | 10 | 2.5 | 625 | 156 | 39 | 10 | 2 | 610 |
| | ng | ng | pg | pg | pg | pg | pg | fg |
| Protein | 10495 | 10038 | 2321.23 | 189.6 | 0 | 0 | 0 | 0 |
| (pg/ml) | | | | | | | | |

TABLE 26
TGF-beta Protein Expression

| | Amount Transfected | | | | |
|---|---|---|---|---|---|
| | 750 ng | 250 ng | 83 ng | Mock | Untreated |
| Protein | 5058 | 4325 | 3210 | 2 | 0 |
| (pg/ml) | | | | | |

[0977] It is to be understood that the words which have been used are words of description rather than limitation, and that changes may be made within the purview of the appended claims without departing from the true scope and spirit of the invention in its broader aspects.

[0978] While the present invention has been described at some length and with some particularity with respect to the several described embodiments, it is not intended that it should be limited to any such particulars or embodiments or any particular embodiment, but it is to be construed with references to the appended claims so as to provide the broadest possible interpretation of such claims in view of the prior art and, therefore, to effectively encompass the intended scope of the invention.

[0979] All publications, patent applications, patents, and other references mentioned herein are incorporated by reference in their entirety. In case of conflict, the present specification, including definitions, will control. In addition, section headings, the materials, methods, and examples are illustrative only and not intended to be limiting.

1. A method for increasing the viability, functionality or longevity of an organ or tissue explant, or portion thereof comprising contacting said organ or tissue explant, or portion thereof with composition comprising a modified mRNA.

2. The method of claim 1, wherein the organ is selected from the group consisting of kidney, heart, lung, liver, pancreas, intestines, spleen, skin and eye.

3. The method of claim 1, wherein the tissue explant is selected from the group consisting of heart valves, bone, vein, middle ear, cartilage, tendon and ligaments.

4. The method of claim 2, wherein the modified mRNA composition comprises a formulated modified mRNA.

5. The method of claim 4, wherein organ is a heart or lung and the formulation is selected from the group consisting of saline, lipids, lipidoids, polymers, liposome formulations, lipid nanoparticles, rapidly eliminated lipid nanoparticles, dynamic polyconjugate formulations, atuplexes, DBTC formulations, PLGA polymers, protamine based agents, cell penetrating peptides, conjugates of sugars or steroids, hydrogels, sealants, and cell-based carrier systems.

6. The method of claim 5, wherein contacting involves administration of the modified mRNA to a host organism.

7. The method of claim 6, wherein the host organism is a donor organism.

8. The method of claim 7, wherein administration to the donor organism occurs either prior to any procedure to remove the heart, lung or pancreas or during heart, lung or pancreas removal.

9. The method of claim 8, wherein the donor organism is a mammal.

10. The method of claim 9, wherein the mammal is human.

11. The method of claim 8, wherein administration is prior to heart, lung or pancreas removal and is effected by delivery to the blood of the donor.

12. The method of claim 8, wherein administration is prior to heart, lung or pancreas removal and is effected by delivery to the blood of the donor after exsanguination of said blood from the donor.

13. The method of claim 8, wherein administration is during heart, lung or pancreas removal and is effected by delivery to the blood of the donor.

14. The method of claim 8, wherein administration is during heart, lung or pancreas removal and is effected by delivery to the chest cavity of the donor.

15. The method of any of claims 11-14, wherein delivery to the blood is facilitated at least in part by the use of, or in combination with, a medical device, system or component.

16. The method of claim 15, wherein the medical device is an ex-vivo organ care system.

17. The method of claim 5, wherein contacting involves administration of the modified mRNA to a recipient organism.

18. The method of claim 17, wherein administration to the recipient organism occurs prior to any procedure to remove the host heart or lung, during host heart removal, after host heart removal but prior to heart or lung transplant, during heart transplant or after heart or lung transplant.

19. The method of claim 18, wherein administration to the recipient organism is facilitated at least in part by the use of, or in combination with, a medical device, system or component.

20. The method of claim 19, wherein the medical device is an ex-vivo organ care system.

21. A pharmaceutical composition comprising a formulated modified mRNA, wherein said modified mRNA encodes a polypeptide which acts as a radical scavenger.

22. A method of reducing reperfusion injury to an organ or tissue explants comprising contacting said organ or tissue explant with a formulated modified mRNA.

23. A method of reducing transplant rejection in an organism comprising contacting said organism with a formulated modified mRNA, wherein said modified mRNA encodes an immunosuppressive agent.

24. The method of claim 4, wherein the formulated modified mRNA encodes protein protein a4beta1, vascular cell adhesion molecule 1 (VCAM-1), VEGF, neuregulin1 (NRG1) thymosin beta-4 major histocompatibility complex (MHC), human leukocyte antigens (HLA), heat shock proteins (HSP), b-cell leukemia/lymphoma-2 (BCL-2), nitric oxide synthase (NOS), interleukin-4, interleukin-10, transforming growth factor beta-1 (TGF-β1), heme oxygenzse 1 (HO-1 or HMOX1), killer cell immunoglobin receptor (KIR), natural killer cell (NK), a protein kinase C (PKC) inhibitor.

The application's sequence listing, which the Patent Office published only in electronic form, follows.

SEQUENCE LISTING (258 sequences)

SEQ ID NO: 1 - DNA, 657 bp, Homo sapiens
gacaactcggtggtggccactgcgcagaccagacttcgctcgtactcgtgcgcctcgcttcgcttttcctccgcaaccatgtctgacaaacccgatatggctgagatcgagaaattcgataagtcgaaactgaagaagacagagacgcaagagaaaaatccactgccttccaaagaaacgattgaacaggagaagcaagcaggcgaatcgtaatgaggcgtgcgccgccaatatgcactgtacattccacaagcattgccttcttattttacttcttttagctgtttaactttgtaagatgcaaagaggttggatcaagtttaaatgactgtgctgcccctttcacatcaaagaactactgacaacgaaggccgcgcctgcctttcccatctgtctatctatctggctggcagggaaggaaagaacttgcatgttggtgaaggaagaagtggggtggaagaagtggggtgggacgacagtgaaatctagagtaaaaccaagctggcccaaggtgtcctgcaggctgtaatgcagtttaatcagagtgccatttttttttttgttcaaatgattttaattattggaatgcacaatttttttaatatgcaaataaaaagtttaaaaacttaaaaaaaaaaaaaaaaaaaaaaaaaaaaa

SEQ ID NO: 2 - DNA, 1702 bp, Homo sapiens
tgggaacagacagatcctttgttctgaggctcactcatctcccgagccccgagccgtctcccagcctcagacggctctgcgggctgcatctgtgcagcctggcagcggcggcgctgcgctgtgacattttcacagcccttcttgcagaggcatgtgtgctagggatgccgaaatgccgagagcgccggcaggactagcttccgggccgcgctttgtgtgctgggctgcagtgtggcgcgggcgaggaagctggtagggcggttgtcgcaagctccagctgcagcctccgcctacgtgagaagactagaaagcgggcgcaggaccaggcctgcgttgtttgcagagaggccgtggctacaaaatggaagtgcttttgcgacctgggctccattttaggaattcttgcccgattttaaccacttgaacgcggaagtggctttcctattctcttccaagccagcctttaattttaaacgctgtaattaacagttcacaggggtcaaattcctttattccggaacattccactttgagagggatctgtcctctttggtcccctgcgttttcaaatatttgaggaaaggtgtcgcctctttttctgtggaaagaggaagctcatgagcgcgaaacagcaggggacggagggcgagaagggctttctcaggttgcgggtcggagggcagaagcacagttcccagtacagagacccggacaggtggctgtttctcacgctcactttggattgctccctacggcttcctccgcagccatgtctgacaaacctggtatggctgagatcgagaaattcgataagtcgaaactgaagaagacagaaacgcaagagaagaatccattgtcttccaaagaaactatcgaacaggagaggcaagcaggcgaatcttaaacaggcatgtgccaccaatatctactgtacattctacaagcattgctttcttattttacttcttttacttgtttaacttggttagatgcaaacacgttggatgagtttgaaaggactatgctgcccttttgacatcaaagacctgctgacaatggaggccacgcctgcttctcccatcgcctgtctggctggcagggaaggaaaatagcttgaatgttggtgaaagacttagcggagtgggagggcagtgaaatctagagtaaaaccaagttgggccaagtgtcctgcagaatctaaaatgaagtttaatcagcgtgccatttttgttgttgtttgaaagattttaatttttggaatgcacagtttttatttaaaaaagacatttttaaaccactgcttgtgagattgcttgttgattggaaagagtgttttattcaccatttaaacgtttgcaaagtggcgtgccccttggcctcacaggcaaagaataacttaaaagctgacgatttgaataaattatgttacagtatgaaatatgttttacctggatatgtaaaataccttctttattctagctaattgggagatgattttttttggctaattgagattacctttagattatgttttcaaaactggcttatactgtaatctacaactaataagcactaatttagagttcagctatattgttgcatgtagtgagaagggacttaattacaaacttaagacgtaagtgtgcaataaagtaagctaagaagaaaaaaaaaaaaaaaaaaaaaaaaaaaaaaaaaaaaa

SEQ ID NO: 3 - DNA, 2377 bp, Homo sapiens
gaggccaggggagggtgcgaaggaggcgcctgcctccaacctgcgggcgggaggtgggtggctgcggggcaattgaaaaagagccggcgaggagttccccgaaacttgttggaactccgggctcgcgcggaggccaggagctgagcggcggcggctgccggacgatgggagcgtgagcaggacggtgataacctctccccgatcgggttgcgagggcgccgggcagaggccaggacgcgagccgccagcggtgggacccatcgacgacttcccggggcgacaggagcagccccgagagccagggcgagcgcccgttccaggtggccggaccgcccgccgcgtccgcgccgcgctccctgcaggcaacgggagacgcccccgcgcagcgcgagcgcctcagcgcggccgctcgctctccccctcgagggacaaacttttcccaaacccgatccgagcccttggaccaaactcgcctgcgccgagagccgtccgcgtagagcgctccgtctccggcgagatgtccgagcgcaaagaaggcagaggcaaagggaagggcaagaagaaggagcgaggctccggcaagaagccggagtccgcggcgggcagccagagcccagccttgcctccccgattgaaagagatgaaaagccaggaatcggctgcaggttccaaactagtccttcggtgtgaaaccagttctgaatactcctctctcagattcaagtggttcaagaatgggaatgaattgaatcgaaaaaacaaaccacaaaatatcaagatacaaaaaaagccagggaagtcagaacttcgcattaacaaagcatcactggctgattctggagagtatatgtgcaaagtgatcagcaaattaggaaatgacagtgcctctgccaatatcaccatcgtggaatcaaacgagatcatcactggtatgccagcctcaactgaaggagcatatgtgtcttcagagtctcccattagaatatcagtatccacagaaggagcaaatacttcttcatctacatctacatccaccactgggacaagccatcttgtaaaatgtgcggagaaggagaaaactttctgtgtgaatggaggggagtgcttcatggtgaaagacctttcaaacccctcgagatacttgtgcaagtgcccaaatgagtttactggtgatcgctgccaaaactacgtaatggccagcttctacaaggcggaggagctgtaccagaagagagtgctgaccataaccggcatctgcatcgccctccttgtggtcggcatcatgtgtgtggtggcctactgcaaaaccaagaaacagcggaaaaagctgcatgaccgtcttcggcagagccttcggtctgaacgaaacaatatgatgaacattgccaatgggcctcaccatcctaacccaccccccgagaatgtccagctggtgaatcaatacgtatctaaaaacgtcatctccagtgagcatattgttgagagagaagcagagacatccttttccaccagtcactatacttccacagcccatcactccactactgtcacccagactcctagccacagctggagcaacggacacactgaaagcatcctttccgaaagccactctgtaatcgtgatgtcatccgtagaaaacagtaggcacagcagcccaactgggggcccaagaggacgtcttaatggcacaggaggccctcgtgaatgtaacagcttcctcaggcatgccagagaaacccctgattcctaccgagactctcctcatagtgaaaggtaaaaccgaagggcaaagctactgcagaggagaaactcagtcagagaatccctgtgagcacctgcggtctcacctcaggaaatctactctaatcagaataaggggcggcagttacctgttctaggagtgctcctagttgatgaagtcatctctttgtttgacggaacttatttcttctgagcttctctcgtcgtcccagtgactgacaggcaacagactcttaaagagctgggatgctttgatgcggaaggtgcagcacatggagtttccagctctggccatgggctcagacccactcggggtctcagtgtcctcagttgtaacattagagagatggcatcaatgcttgataaggacccttctataattccaattgccagttatccaaactctgattcggtggtcgagctggcctcgtgttcttatctgctaaccctgtcttaccttccagcctcagttaagtcaaatcaagggctatgtcattgctgaatgtcatggggggcaactgcttgccctccaccctatagtatctattttatgaaattccaagaagggatgaataaataaatctcttggatgctgaaaaaaaaaaaaaaaaaa

SEQ ID NO: 4 - DNA, 1638 bp, Homo sapiens
gaggccaggggagggtgcgaaggaggcgcctgcctccaacctgcgggcgggaggtgggtggctgcggggcaattgaaaaagagccggcgaggagttccccgaaacttgttggaactccgggctcgcgcggaggccaggagctgagcggcggcggctgccggacgatgggagcgtgagcaggacggtgataacctctccccgatcgggttgcgagggcgccgggcagaggccaggacgcgagccgccagcggtgggacccatcgacgacttcccggggcgacaggagcagccccgagagccagggcgagcgcccgttccaggtggccggaccgcccgccgcgtccgcgccgcgctccctgcaggcaacgggagacgcccccgcgcagcgcgagcgcctcagcgcggccgctcgctctccccctcgagggacaaacttttcccaaacccgatccgagcccttggaccaaactcgcctgcgccgagagccgtccgcgtagagcgctccgtctccggcgagatgtccgagcgcaaagaaggcagaggcaaagggaagggcaagaagaaggagcgaggctccggcaagaagccggagtccgcggcgggcagccagagcccagccttgcctccccgattgaaagagatgaaaagccaggaatcggctgcaggttccaaactagtccttcggtgtgaaaccagttctgaatactcctctctcagattcaagtggttcaagaatgggaatgaattgaatcgaaaaaacaaaccacaaaatatcaagatacaaaaaaagccagggaagtcagaacttcgcattaacaaagcatcactggctgattctggagagtatatgtgcaaagtgatcagcaaattaggaaatgacagtgcctctgccaatatcaccatcgtggaatcaaacgctacatctacatccaccactgggacaagccatcttgtaaaatgtgcggagaaggagaaaactttctgtgtgaatggaggggagtgcttcatggtgaaagacctttcaaacccctcgagatacttgtgcaagtgcccaaatgagtttactggtgatcgctgccaaaactacgtaatggccagcttctacagtacgtccactccctttctgtctctgcctgaataggagcatgctcagttggtgctgctttcttgttgctgcatctcccctcagattccacctagagctagatgtgtcttaccagatctaatattgactgcctctgcctgtcgcatgagaacattaacaaaagcaattgtattacttcctctgttcgcgactagttggctctgagatactaataggtgtgtgaggctccggatgtttctggaattgatattgaatgatgtgatacaaattgatagtcaatatcaagcagtgaaatatgataataaaggcatttcaaagtctcacttttattgataaaataaaaatcattctactgaacagtccatcttctttatacaatgaccacatcctgaaaagggtgttgctaagctgtaaccgatatgcacttgaaatgatggtaagttaattttgattcagaatgtgttatttgtcacaaataaacataataaaaggagttcagatgtttttcttcattaaccaaaaaaaaaaaaaaa

SEQ ID NO: 5 - DNA, 1643 bp, Homo sapiens
gaggccaggggagggtgcgaaggaggcgcctgcctccaacctgcgggcgggaggtgggtggctgcggggcaattgaaaaagagccggcgaggagttccccgaaacttgttggaactccgggctcgcgcggaggccaggagctgagcggcggcggctgccggacgatgggagcgtgagcaggacggtgataacctctccccgatcgggttgcgagggcgccgggcagaggccaggacgcgagccgccagcggtgggacccatcgacgacttcccggggcgacaggagcagccccgagagccagggcgagcgcccgttccaggtggccggaccgcccgccgcgtccgcgccgcgctccctgcaggcaacgggagacgcccccgcgcagcgcgagcgcctcagcgcggccgctcgctctccccctcgagggacaaacttttcccaaacccgatccgagcccttggaccaaactcgcctgcgccgagagccgtccgcgtagagcgctccgtctccggcgagatgtccgagcgcaaagaaggcagaggcaaagggaagggcaagaagaaggagcgaggctccggcaagaagccggagtccgcggcgggcagccagagcccagccttgcctccccgattgaaagagatgaaaagccaggaatcggctgcaggttccaaactagtccttcggtgtgaaaccagttctgaatactcctctctcagattcaagtggttcaagaatgggaatgaattgaatcgaaaaaacaaaccacaaaatatcaagatacaaaaaaagccagggaagtcagaacttcgcattaacaaagcatcactggctgattctggagagtatatgtgcaaagtgatcagcaaattaggaaatgacagtgcctctgccaatatcaccatcgtggaatcaaacgagatcatcactggtatgccagcctcaactgaaggagcatatgtgtcttcagctacatctacatccaccactgggacaagccatcttgtaaaatgtgcggagaaggagaaaactttctgtgtgaatggaggggagtgcttcatggtgaaagacctttcaaacccctcgagatacttgtgcaagtaagaaaagaaatcctgtgtgtcgcttatgtctataactccttgtttcagatgattctatgtctcatgatgtattgttgctttttttccaattttgttgcatcatgttgaataatgctgttttatatgtagagtgttttaaaacattcacaccattcgtcatcactcctctgtcatatgcagaattgttttttgctcttttcaatgtgtgtgaggtgttttttgtttttgtttttgttttttgccatgttatttatagtgttgctttccttgtggtttttcttgttgttattcagaaaagatgtgcagatatcacagaggcctataacttttggtatctacttctacatccaatgtatgaattaagctgtaagataatgttgctttcttatcccagtgatcacctgccaaatgaataagacaacaaagagaagcagaagggcagaagattatttactgacatatatctattacacttgggattgtcttactgttgcataactattttttaaacggagtttagttttatattgctagtaaaaaaa

SEQ ID NO: 6 - DNA, 2604 bp, Homo sapiens
gcactcggggcgacagagagggaggaggcgcgcggggacggggacgcccaggaggacccactcgcgggtcccgctccgctccggcagcagcatggggaaaggacgcgcgggccgagttggcaccacagccttgcctccccgattgaaagagatgaaaagccaggaatcggctgcaggttccaaactagtccttcggtgtgaaaccagttctgaatactcctctctcagattcaagtggttcaagaatgggaatgaattgaatcgaaaaaacaaaccacaaaatatcaagatacaaaaaaagccagggaagtcagaacttcgcattaacaaagcatcactggctgattctggagagtatatgtgcaaagtgatcagcaaattaggaaatgacagtgcctctgccaatatcaccatcgtggaatcaaacgagatcatcactggtatgccagcctcaactgaaggagcatatgtgtcttcagagtctcccattagaatatcagtatccacagaaggagcaaatacttcttcatctacatctacatccaccactgggacaagccatcttgtaaaatgtgcggagaaggagaaaactttctgtgtgaatggaggggagtgcttcatggtgaaagacctttcaaacccctcgagatacttgtgcaagtgcccaaatgagtttactggtgatcgctgccaaaactacgtaatggccagcttctacaagcatcttgggattgaatttatggaggcggaggagctgtaccagaagagagtgctgaccataaccggcatctgcatcgccctccttgtggtcggcatcatgtgtgtggtggcctactgcaaaaccaagaaacagcggaaaaagctgcatgaccgtcttcggcagagccttcggtctgaacgaaacaatatgatgaacattgccaatgggcctcaccatcctaacccaccccccgagaatgtccagctggtgaatcaatacgtatctaaaaacgtcatctccagtgagcatattgttgagagagaagcagagacatccttttccaccagtcactatacttccacagcccatcactccactactgtcacccagactcctagccacagctggagcaacggacacactgaaagcatcctttccgaaagccactctgtaatcgtgatgtcatccgtagaaaacagtaggcacagcagcccaactgggggcccaagaggacgtcttaatggcacaggaggccctcgtgaatgtaacagcttcctcaggcatgccagagaaacccctgattcctaccgagactctcctcatagtgaaaggtatgtgtcagccatgaccaccccggctcgtatgtcacctgtagatttccacacgccaagctcccccaaatcgcccccttcggaaatgtctccacccgtgtccagcatgacggtgtccatgccttccatggcggtcagccccttcatggaagaagagagacctctacttctcgtgacaccaccaaggctgcgggagaagaagtttgaccatcaccctcagcagttcagctccttccaccacaaccccgcgcatgacagtaacagcctccctgctagccccttgaggatagtggaggatgaggagtatgaaacgacccaagagtacgagccagcccaagagcctgttaagaaactcgccaatagccggcgggccaaaagaaccaagcccaatggccacattgctaacagattggaagtggacagcaacacaagctcccagagcagtaactcagagagtgaaacagaagatgaaagagtaggtgaagatacgcctttcctgggcatacagaaccccctggcagccagtcttgaggcaacacctgccttccgcctggctgacagcaggactaacccagcaggccgcttctcgacacaggaagaaatccaggccaggctgtctagtgtaattgctaaccaagaccctattgctgtataaaacctaaataaacacatagattcacctgtaaaactttattttatataataaagtattccaccttaaattaaacaatttattttattttagcagttctgcaaatagaaaacaggaaaaaaacttttataaattaaatatatgtatgtaaaaatgtgttatgtgccatatgtagcaattttttacagtatttcaaaacgagaaagatatcaatggtgcctttatgttatgttatgtcgagagcaagttttgtacagttacagtgattgcttttccacagtatttctgcaaaacctctcatagattcagtttttgctggcttcttgtgcattgcattatgatgttgactggatgtatgatttgcaagacttgcaactgtccctctgtttgcttgtagtagcacccgatcagtatgtcttgtaatggcacatccatccagatatgcctctcttgtgtatgaagttttctttgctttcagaatatgaaatgagttgtgtctactctgccagccaaaggtttgcctcattgggctctgagataatagtagatccaacagcatgctactattaaatacagcaagaaactgcattaagtaatgttaaatattaggaagaaagtaatactgtgatttaaaaaaaact

SEQ ID NO: 7 - DNA, 2553 bp, Homo sapiens
gcactcggggcgacagagagggaggaggcgcgcggggacggggacgcccaggaggacccactcgcgggtcccgctccgctccggcagcagcatggggaaaggacgcgcgggccgagttggcaccacagccttgcctccccgattgaaagagatgaaaagccaggaatcggctgcaggttccaaactagtccttcggtgtgaaaccagttctgaatactcctctctcagattcaagtggttcaagaatgggaatgaattgaatcgaaaaaacaaaccacaaaatatcaagatacaaaaaaagccagggaagtcagaacttcgcattaacaaagcatcactggctgattctggagagtatatgtgcaaagtgatcagcaaattaggaaatgacagtgcctctgccaatatcaccatcgtggaatcaaacgagatcatcactggtatgccagcctcaactgaaggagcatatgtgtcttcagctacatctacatccaccactgggacaagccatcttgtaaaatgtgcggagaaggagaaaactttctgtgtgaatggaggggagtgcttcatggtgaaagacctttcaaacccctcgagatacttgtgcaagtgcccaaatgagtttactggtgatcgctgccaaaactacgtaatggccagcttctacaagcatcttgggattgaatttatggaggcggaggagctgtaccagaagagagtgctgaccataaccggcatctgcatcgccctccttgtggtcggcatcatgtgtgtggtggcctactgcaaaaccaagaaacagcggaaaaagctgcatgaccgtcttcggcagagccttcggtctgaacgaaacaatatgatgaacattgccaatgggcctcaccatcctaacccaccccccgagaatgtccagctggtgaatcaatacgtatctaaaaacgtcatctccagtgagcatattgttgagagagaagcagagacatccttttccaccagtcactatacttccacagcccatcactccactactgtcacccagactcctagccacagctggagcaacggacacactgaaagcatcctttccgaaagccactctgtaatcgtgatgtcatccgtagaaaacagtaggcacagcagcccaactgggggcccaagaggacgtcttaatggcacaggaggccctcgtgaatgtaacagcttcctcaggcatgccagagaaacccctgattcctaccgagactctcctcatagtgaaaggtatgtgtcagccatgaccaccccggctcgtatgtcacctgtagatttccacacgccaagctcccccaaatcgcccccttcggaaatgtctccacccgtgtccagcatgacggtgtccatgccttccatggcggtcagccccttcatggaagaagagagacctctacttctcgtgacaccaccaaggctgcgggagaagaagtttgaccatcaccctcagcagttcagctccttccaccacaaccccgcgcatgacagtaacagcctccctgctagccccttgaggatagtggaggatgaggagtatgaaacgacccaagagtacgagccagcccaagagcctgttaagaaactcgccaatagccggcgggccaaaagaaccaagcccaatggccacattgctaacagattggaagtggacagcaacacaagctcccagagcagtaactcagagagtgaaacagaagatgaaagagtaggtgaagatacgcctttcctgggcatacagaaccccctggcagccagtcttgaggcaacacctgccttccgcctggctgacagcaggactaacccagcaggccgcttctcgacacaggaagaaatccaggccaggctgtctagtgtaattgctaaccaagaccctattgctgtataaaacctaaataaacacatagattcacctgtaaaactttattttatataataaagtattccaccttaaattaaacaatttattttattttagcagttctgcaaatagaaaacaggaaaaaaacttttataaattaaatatatgtatgtaaaaatgtgttatgtgccatatgtagcaattttttacagtatttcaaaacgagaaagatatcaatggtgcctttatgttatgttatgtcgagagcaagttttgtacagttacagtgattgcttttccacagtatttctgcaaaacctctcatagattcagtttttgctggcttcttgtgcattgcattatgatgttgactggatgtatgatttgcaagacttgcaactgtccctctgtttgcttgtagtagcacccgatcagtatgtcttgtaatggcacatccatccagatatgcctctcttgtgtatgaagttttctttgctttcagaatatgaaatgagttgtgtctactctgccagccaaaggtttgcctcattgggctctgagataatagtagatccaacagcatgctactattaaatacagcaagaaactgcattaagtaatgttaaatattaggaagaaagtaatactgtgatttaaaaaaaact

SEQ ID NO: 8 - DNA, 2553 bp, Homo sapiens; identical to SEQ ID NO: 7

SEQ ID NO: 9 - DNA, 3069 bp, Homo sapiens
gaggccaggggagggtgcgaaggaggcgcctgcctccaacctgcgggcgggaggtgggtggctgcggggcaattgaaaaagagccggcgaggagttccccgaaacttgttggaactccgggctcgcgcggaggccaggagctgagcggcggcggctgccggacgatgggagcgtgagcaggacggtgataacctctccccgatcgggttgcgagggcgccgggcagaggccaggacgcgagccgccagcggtgggacccatcgacgacttcccggggcgacaggagcagccccgagagccagggcgagcgcccgttccaggtggccggaccgcccgccgcgtccgcgccgcgctccctgcaggcaacgggagacgcccccgcgcagcgcgagcgcctcagcgcggccgctcgctctccccctcgagggacaaacttttcccaaacccgatccgagcccttggaccaaactcgcctgcgccgagagccgtccgcgtagagcgctccgtctccggcgagatgtccgagcgcaaagaaggcagaggcaaagggaagggcaagaagaaggagcgaggctccggcaagaagccggagtccgcggcgggcagccagagcccagccttgcctccccgattgaaagagatgaaaagccaggaatcggctgcaggttccaaactagtccttcggtgtgaaaccagttctgaatactcctctctcagattcaagtggttcaagaatgggaatgaattgaatcgaaaaaacaaaccacaaaatatcaagatacaaaaaaagccagggaagtcagaacttcgcattaacaaagcatcactggctgattctggagagtatatgtgcaaagtgatcagcaaattaggaaatgacagtgcctctgccaatatcaccatcgtggaatcaaacgagatcatcactggtatgccagcctcaactgaaggagcatatgtgtcttcagagtctcccattagaatatcagtatccacagaaggagcaaatacttcttcatctacatctacatccaccactgggacaagccatcttgtaaaatgtgcggagaaggagaaaactttctgtgtgaatggaggggagtgcttcatggtgaaagacctttcaaacccctcgagatacttgtgcaagtgcccaaatgagtttactggtgatcgctgccaaaactacgtaatggccagcttctacaaggcggaggagctgtaccagaagagagtgctgaccataaccggcatctgcatcgccctccttgtggtcggcatcatgtgtgtggtggcctactgcaaaaccaagaaacagcggaaaaagctgcatgaccgtcttcggcagagccttcggtctgaacgaaacaatatgatgaacattgccaatgggcctcaccatcctaacccaccccccgagaatgtccagctggtgaatcaatacgtatctaaaaacgtcatctccagtgagcatattgttgagagagaagcagagacatccttttccaccagtcactatacttccacagcccatcactccactactgtcacccagactcctagccacagctggagcaacggacacactgaaagcatcctttccgaaagccactctgtaatcgtgatgtcatccgtagaaaacagtaggcacagcagcccaactgggggcccaagaggacgtcttaatggcacaggaggccctcgtgaatgtaacagcttcctcaggcatgccagagaaacccctgattcctaccgagactctcctcatagtgaaaggtatgtgtcagccatgaccaccccggctcgtatgtcacctgtagatttccacacgccaagctcccccaaatcgcccccttcggaaatgtctccacccgtgtccagcatgacggtgtccatgccttccatggcggtcagccccttcatggaagaagagagacctctacttctcgtgacaccaccaaggctgcgggagaagaagtttgaccatcaccctcagcagttcagctccttccaccacaaccccgcgcatgacagtaacagcctccctgctagccccttgaggatagtggaggatgaggagtatgaaacgacccaagagtacgagccagcccaagagcctgttaagaaactcgccaatagccggcgggccaaaagaaccaagcccaatggccacattgctaacagattggaagtggacagcaacacaagctcccagagcagtaactcagagagtgaaacagaagatgaaagagtaggtgaagatacgcctttcctgggcatacagaaccccctggcagccagtcttgaggcaacacctgccttccgcctggctgacagcaggactaacccagcaggccgcttctcgacacaggaagaaatccaggccaggctgtctagtgtaattgctaaccaagaccctattgctgtataaaacctaaataaacacatagattcacctgtaaaactttattttatataataaagtattccaccttaaattaaacaatttattttattttagcagttctgcaaatagaaaacaggaaaaaaacttttataaattaaatatatgtatgtaaaaatgtgttatgtgccatatgtagcaattttttacagtatttcaaaacgagaaagatatcaatggtgcctttatgttatgttatgtcgagagcaagttttgtacagttacagtgattgcttttccacagtatttctgcaaaacctctcatagattcagtttttgctggcttcttgtgcattgcattatgatgttgactggatgtatgatttgcaagacttgcaactgtccctctgtttgcttgtagtagcacccgatcagtatgtcttgtaatggcacatccatccagatatgcctctcttgtgtatgaagttttctttgctttcagaatatgaaatgagttgtgtctactctgccagccaaaggtttgcctcattgggctctgagataatagtagatccaacagcatgctactattaaatacagcaagaaactgcattaagtaatgttaaatattaggaagaaagtaatactgtgatttaaaaaaaact

SEQ ID NO: 10 - DNA, 3069 bp, Homo sapiens; identical to SEQ ID NO: 9

SEQ ID NO: 11 - DNA, 1694 bp, Homo sapiens
gaggccaggggagggtgcgaaggaggcgcctgcctccaacctgcgggcgggaggtgggtggctgcggggcaattgaaaaagagccggcgaggagttccccgaaacttgttggaactccgggctcgcgcggaggccaggagctgagcggcggcggctgccggacgatgggagcgtgagcaggacggtgataacctctccccgatcgggttgcgagggcgccgggcagaggccaggacgcgagccgccagcggtgggacccatcgacgacttcccggggcgacaggagcagccccgagagccagggcgagcgcccgttccaggtggccggaccgcccgccgcgtccgcgccgcgctccctgcaggcaacgggagacgcccccgcgcagcgcgagcgcctcagcgcggccgctcgctctccccctcgagggacaaacttttcccaaacccgatccgagcccttggaccaaactcgcctgcgccgagagccgtccgcgtagagcgctccgtctccggcgagatgtccgagcgcaaagaaggcagaggcaaagggaagggcaagaagaaggagcgaggctccggcaagaagccggagtccgcggcgggcagccagagcccagccttgcctccccgattgaaagagatgaaaagccaggaatcggctgcaggttccaaactagtccttcggtgtgaaaccagttctgaatactcctctctcagattcaagtggttcaagaatgggaatgaattgaatcgaaaaaacaaaccacaaaatatcaagatacaaaaaaagccagggaagtcagaacttcgcattaacaaagcatcactggctgattctggagagtatatgtgcaaagtgatcagcaaattaggaaatgacagtgcctctgccaatatcaccatcgtggaatcaaacgagatcatcactggtatgccagcctcaactgaaggagcatatgtgtcttcagagtctcccattagaatatcagtatccacagaaggagcaaatacttcttcatctacatctacatccaccactgggacaagccatcttgtaaaatgtgcggagaaggagaaaactttctgtgtgaatggaggggagtgcttcatggtgaaagacctttcaaacccctcgagatacttgtgcaagtaagaaaagaaatcctgtgtgtcgcttatgtctataactccttgtttcagatgattctatgtctcatgatgtattgttgctttttttccaattttgttgcatcatgttgaataatgctgttttatatgtagagtgttttaaaacattcacaccattcgtcatcactcctctgtcatatgcagaattgttttttgctcttttcaatgtgtgtgaggtgttttttgtttttgtttttgttttttgccatgttatttatagtgttgctttccttgtggtttttcttgttgttattcagaaaagatgtgcagatatcacagaggcctataacttttggtatctacttctacatccaatgtatgaattaagctgtaagataatgttgctttcttatcccagtgatcacctgccaaatgaataagacaacaaagagaagcagaagggcagaagattatttactgacatatatctattacacttgggattgtcttactgttgcataactattttttaaacggagtttagttttatattgctagtaaaaaaa

SEQ ID NO: 12 - DNA, 2374 bp, Homo sapiens
ggcttaactgatgcctgcctgcctctctttgatttgatggcctttattccttctaattggataaaataggaagtcactggcagtcctgtgtggctggggatactgattttactcagaccagcctgcagctctagagtgtgggtagagagcggggagtgggggttgggagagggggaggaaagagagagaggagagaggacgggcttggatgaagaagggaaagaaagagaaagagactgaagcagagaagagccgcagaggaagaaagtgaatgagcactcaagaaggacaaagaggagtagtcgggggtggggtggaggcagggcggggaagggagtgaccgcccctcctggctgcactcttgcctccggagccctctgatcctgtttgcagtgatgctccgagggcaggcacctgctgctctgtaatgattcagcccctttcagccgtcgtcgcgttaacacaacaggatgctgttgctattgtcactactgcctctcctgccgccgctgctgctgccgccgccgccaccgccgctggtcctccttctgcttttacttctcctgcatgacagttgttttcttcatctgagcagacaccagcttcagatgctcgaggtgagaaacatgcctttcagtttgggctactggtttacttaattaatcagccggcagctccgtcgatctattttcgtccctgtcctcttgacgagcccgggatggtttggagtagcatttaaaagaactagaaaagtggcccagaaacagcagcttaaagaattattacgatatactttgattttgtagttgctaggagcttttcttccccccttgcatctttctgaactcttcttgattttaataatggccttggacttggacgatttatcgatttccccctgtaagatgctgtatcatttggttgggggggcctctgcgtggtaatggaccgtgagagcggccaggccttcttctggaggtgagccgatggagatttattccccagacatgtctgaggtcgccgccgagaggtcctccagcccctccactcagctgagtgcagacccatctcttgatgggcttccggcagcagaagacatgccagagccccagactgaagatgggagaacccctggactcgtgggcctggccgtgccctgctgtgcgtgcctagaagctgagcgcctgagaggttgcctcaactcagagaaaatctgcattgtccccatcctggcttgcctggtcagcctctgcctctgcatcgccggcctcaagtgggtatttgtggacaagatctttgaatatgactctcctactcaccttgaccctggggggttaggccaggaccctattatttctctggacgcaactgctgcctcagctgtgtgggtgtcgtctgaggcatacacttcacctgtctctagggctcaatctgaaagtgaggttcaagttacagtgcaaggtgacaaggctgttgtctcctttgaaccatcagcggcaccgacaccgaagaatcgtatttttgccttttctttcttgccgtccactgcgccatccttcccttcacccacccggaaccctgaggtgagaacgcccaagtcagcaactcagccacaaacaacagaaactaatctccaaactgctcctaaactttctacatctacatccaccactgggacaagccatcttgtaaaatgtgcggagaaggagaaaactttctgtgtgaatggaggggagtgcttcatggtgaaagacctttcaaacccctcgagatacttgtgcaagtgcccaaatgagtttactggtgatcgctgccaaaactacgtaatggccagcttctacagtacgtccactccctttctgtctctgcctgaataggagcatgctcagttggtgctgctttcttgttgctgcatctcccctcagattccacctagagctagatgtgtcttaccagatctaatattgactgcctctgcctgtcgcatgagaacattaacaaaagcaattgtattacttcctctgttcgcgactagttggctctgagatactaataggtgtgtgaggctccggatgtttctggaattgatattgaatgatgtgatacaaattgatagtcaatatcaagcagtgaaatatgataataaaggcatttcaaagtctcacttttattgataaaataaaaatcattctactgaacagtccatcttctttatacaatgaccacatcctgaaaagggtgttgctaagctgtaaccgatatgcacttgaaatgatggtaagttaattttgattcagaatgtgttatttgtcacaaataaacataataaaaggagttcagatgtttttcttcattaaccaaaaaaaaaaaaaaa

SEQ ID NO: 13 - DNA, 1987 bp, Homo sapiens
tttttttttttgcccttatacctcttcgcctttctgtggttccatccacttcttccccctcctcctcccataaacaactctcctacccctgcacccccaataaataaataaaaggaggagggcaaggggggaggaggaggagtggtgctgcgaggggaaggaaaagggaggcagcgcgagagagccgggcagagtccgaaccgacagccagaagcccgcacgcacctcgcaccatgagatggcgacgcgccccgcgccgctccgggcgtcccggcccccgggcccagcgccccggctccgccgcccgctcgtcgccgccgctgccgctgctgccactactgctgctgctggggaccgcggccctggcgccgggggcggcggccggcaacgaggcggctcccgcgggggcctcggtgtgctactcgtccccgcccagcgtgggatcggtgcaggagctagctcagcgcgccgcggtggtgatcgagggaaaggtgcacccgcagcggcggcagcagggggcactcgacaggaaggcggcggcggcggcgggcgaggcaggggcgtggggcggcgatcgcgagccgccagccgcgggcccacgggcgctggggccgcccgccgaggagccgctgctcgccgccaacgggaccgtgccctcttggcccaccgccccggtgcccagcgccggcgagcccggggaggaggcgccctatctggtgaaggtgcaccaggtgtgggcggtgaaagccgggggcttgaagaaggactcgctgctcaccgtgcgcctggggacctggggccaccccgccttcccctcctgcgggaggctcaaggaggacagcaggtacatcttcttcatggagcccgacgccaacagcaccagccgcgcgccggccgccttccgagcctctttcccccctctggagacgggccggaacctcaagaaggaggtcagccgggtgctgtgcaagcggtgcgccttgcctccccgattgaaagagatgaaaagccaggaatcggctgcaggttccaaactagtccttcggtgtgaaaccagttctgaatactcctctctcagattcaagtggttcaagaatgggaatgaattgaatcgaaaaaacaaaccacaaaatatcaagatacaaaaaaagccagggaagtcagaacttcgcattaacaaagcatcactggctgattctggagagtatatgtgcaaagtgatcagcaaattaggaaatgacagtgcctctgccaatatcaccatcgtggaatcaaacgctacatctacatccaccactgggacaagccatcttgtaaaatgtgcggagaaggagaaaactttctgtgtgaatggaggggagtgcttcatggtgaaagacctttcaaacccctcgagatacttgtgcaagtgcccaaatgagtttactggtgatcgctgccaaaactacgtaatggccagcttctacagtacgtccactccctttctgtctctgcctgaataggagcatgctcagttggtgctgctttcttgttgctgcatctcccctcagattccacctagagctagatgtgtcttaccagatctaatattgactgcctctgcctgtcgcatgagaacattaacaaaagcaattgtattacttcctctgttcgcgactagttggctctgagatactaataggtgtgtgaggctccggatgtttctggaattgatattgaatgatgtgatacaaattgatagtcaatatcaagcagtgaaatatgataataaaggcatttcaaagtctcacttttattgataaaataaaaatcattctactgaacagtccatcttctttatacaatgaccacatcctgaaaagggtgttgctaagctgtaaccgatatgcacttgaaatgatggtaagttaattttgattcagaatgtgttatttgtcacaaataaacataataaaaggagttcagatgtttttcttcattaaccaaa

SEQ ID NO: 14 - DNA, 1592 bp, Homo sapiens
gaggccaggggagggtgcgaaggaggcgcctgcctccaacctgcgggcgggaggtgggtggctgcggggcaattgaaaaagagccggcgaggagttccccgaaacttgttggaactccgggctcgcgcggaggccaggagctgagcggcggcggctgccggacgatgggagcgtgagcaggacggtgataacctctccccgatcgggttgcgagggcgccgggcagaggccaggacgcgagccgccagcggtgggacccatcgacgacttcccggggcgacaggagcagccccgagagccagggcgagcgcccgttccaggtggccggaccgcccgccgcgtccgcgccgcgctccctgcaggcaacgggagacgcccccgcgcagcgcgagcgcctcagcgcggccgctcgctctccccctcgagggacaaacttttcccaaacccgatccgagcccttggaccaaactcgcctgcgccgagagccgtccgcgtagagcgctccgtctccggcgagatgtccgagcgcaaagaaggcagaggcaaagggaagggcaagaagaaggagcgaggctccggcaagaagccggagtccgcggcgggcagccagagcccagccttgcctccccgattgaaagagatgaaaagccaggaatcggctgcaggttccaaactagtccttcggtgtgaaaccagttctgaatactcctctctcagattcaagtggttcaagaatgggaatgaattgaatcgaaaaaacaaaccacaaaatatcaagatacaaaaaaagccagggaagtcagaacttcgcattaacaaagcatcactggctgattctggagagtatatgtgcaaagtgatcagcaaattaggaaatgacagtgcctctgccaatatcaccatcgtggaatcaaacgctacatctacatccaccactgggacaagccatcttgtaaaatgtgcggagaaggagaaaactttctgtgtgaatggaggggagtgcttcatggtgaaagacctttcaaacccctcgagatacttgtgcaagtaagaaaagaaatcctgtgtgtcgcttatgtctataactccttgtttcagatgattctatgtctcatgatgtattgttgctttttttccaattttgttgcatcatgttgaataatgctgttttatatgtagagtgttttaaaacattcacaccattcgtcatcactcctctgtcatatgcagaattgttttttgctcttttcaatgtgtgtgaggtgttttttgtttttgtttttgttttttgccatgttatttatagtgttgctttccttgtggtttttcttgttgttattcagaaaagatgtgcagatatcacagaggcctataacttttggtatctacttctacatccaatgtatgaattaagctgtaagataatgttgctttcttatcccagtgatcacctgccaaatgaataagacaacaaagagaagcagaagggcagaagattatttactgacatatatctattacacttgggattgtcttactgttgcataactattttttaaacggagtttagttttatattgctagtaaaaaaa

SEQ ID NO: 15 - DNA, 3211 bp, Homo sapiens
gaggccaggggagggtgcgaaggaggcgcctgcctccaacctgcgggcgggaggtgggtggctgcggggcaattgaaaaagagccggcgaggagttccccgaaacttgttggaactccgggctcgcgcggaggccaggagctgagcggcggcggctgccggacgatgggagcgtgagcaggacggtgataacctctccccgatcgggttgcgagggcgccgggcagaggccaggacgcgagccgccagcggtgggacccatcgacgacttcccggggcgacaggagcagccccgagagccagggcgagcgcccgttccaggtggccggaccgcccgccgcgtccgcgccgcgctccctgcaggcaacgggagacgcccccgcgcagcgcgagcgcctcagcgcggccgctcgctctccccctcgagggacaaacttttcccaaacccgatccgagcccttggaccaaactcgcctgcgccgagagccgtccgcgtagagcgctccgtctccggcgagatgtccgagcgcaaagaaggcagaggcaaagggaagggcaagaagaaggagcgaggctccggcaagaagccggagtccgcggcgggcagccagagcccagccttgcctccccgattgaaagagatgaaaagccaggaatcggctgcaggttccaaactagtccttcggtgtgaaaccagttctgaatactcctctctcagattcaagtggttcaagaatgggaatgaattgaatcgaaaaaacaaaccacaaaatatcaagatacaaaaaaagccagggaagtcagaacttcgcattaacaaagcatcactggctgattctggagagtatatgtgcaaagtgatcagcaaattaggaaatgacagtgcctctgccaatatcaccatcgtggaatcaaacgagatcatcactggtatgccagcctcaactgaaggagcatatgtgtcttcagagtctcccattagaatatcagtatccacagaaggagcaaatacttcttcatctacatctacatccaccactgggacaagccatcttgtaaaatgtgcggagaaggagaaaactttctgtgtgaatggaggggagtgcttcatggtgaaagacctttcaaacccctcgagatacttgtgcaagtgcccaaatgagtttactggtgatcgctgccaaaactacgtaatggccagcttctacaaggcggaggagctgtaccagaagagagtgctgaccataaccggcatctgcatcgccctccttgtggtcggcatcatgtgtgtggtggcctactgcaaaaccaagaaacagcggaaaaagctgcatgaccgtcttcggcagagccttcggtctgaacgaaacaatatgatgaacattgccaatgggcctcaccatcctaacccaccccccgagaatgtccagctggtgaatcaatacgtatctaaaaacgtcatctccagtgagcatattgttgagagagaagcagagacatccttttccaccagtcactatacttccacagcccatcactccactactgtcacccagactcctagccacagctggagcaacggacacactgaaagcatcctttccgaaagccactctgtaatcgtgatgtcatccgtagaaaacagtaggcacagcagcccaactgggggcccaagaggacgtcttaatggcacaggaggccctcgtgaatgtaacagcttcctcaggcatgccagagaaacccctgattcctaccgagactctcctcatagtgaaagacataaccttatagctgagctaaggagaaacaaggcacacagatccaaatgcatgcagatccagctatcagcaactcatcttagatcttcttccattccccatttgggcttcattctctaagaccccttggcctttaggaaggtatgtgtcagccatgaccaccccggctcgtatgtcacctgtagatttccacacgccaagctcccccaaatcgcccccttcggaaatgtctccacccgtgtccagcatgacggtgtccatgccttccatggcggtcagccccttcatggaagaagagagacctctacttctcgtgacaccaccaaggctgcgggagaagaagtttgaccatcaccctcagcagttcagctccttccaccacaaccccgcgcatgacagtaacagcctccctgctagccccttgaggatagtggaggatgaggagtatgaaacgacccaagagtacgagccagcccaagagcctgttaagaaactcgccaatagccggcgggccaaaagaaccaagcccaatggccacattgctaacagattggaagtggacagcaacacaagctcccagagcagtaactcagagagtgaaacagaagatgaaagagtaggtgaagatacgcctttcctgggcatacagaaccccctggcagccagtcttgaggcaacacctgccttccgcctggctgacagcaggactaacccagcaggccgcttctcgacacaggaagaaatccaggccaggctgtctagtgtaattgctaaccaagaccctattgctgtataaaacctaaataaacacatagattcacctgtaaaactttattttatataataaagtattccaccttaaattaaacaatttattttattttagcagttctgcaaatagaaaacaggaaaaaaacttttataaattaaatatatgtatgtaaaaatgtgttatgtgccatatgtagcaattttttacagtatttcaaaacgagaaagatatcaatggtgcctttatgttatgttatgtcgagagcaagttttgtacagttacagtgattgcttttccacagtatttctgcaaaacctctcatagattcagtttttgctggcttcttgtgcattgcattatgatgttgactggatgtatgatttgcaagacttgcaactgtccctctgtttgcttgtagtagcacccgatcagtatgtcttgtaatggcacatccatccagatatgcctctcttgtgtatgaagttttctttgctttcagaatatgaaatgagttgtgtctactctgccagccaaaggtttgcctcattgggctctgagataatagtagatccaacagcatgctactattaaatacagcaagaaactgcattaagtaatgttaaatattaggaagaaagtaatactgtgatttaaaaaaaact

SEQ ID NO: 16 - DNA, 2502 bp, Homo sapiens
gcactcggggcgacagagagggaggaggcgcgcggggacggggacgcccaggaggacccactcgcgggtcccgctccgctccggcagcagcatggggaaaggacgcgcgggccgagttggcaccacagccttgcctccccgattgaaagagatgaaaagccaggaatcggctgcaggttccaaactagtccttcggtgtgaaaccagttctgaatactcctctctcagattcaagtggttcaagaatgggaatgaattgaatcgaaaaaacaaaccacaaaatatcaagatacaaaaaaagccagggaagtcagaacttcgcattaacaaagcatcactggctgattctggagagtatatgtgcaaagtgatcagcaaattaggaaatgacagtgcctctgccaatatcaccatcgtggaatcaaacgctacatctacatccaccactgggacaagccatcttgtaaaatgtgcggagaaggagaaaactttctgtgtgaatggaggggagtgcttcatggtgaaagacctttcaaacccctcgagatacttgtgcaagtgcccaaatgagtttactggtgatcgctgccaaaactacgtaatggccagcttctacaagcatcttgggattgaatttatggaggcggaggagctgtaccagaagagagtgctgaccataaccggcatctgcatcgccctccttgtggtcggcatcatgtgtgtggtggcctactgcaaaaccaagaaacagcggaaaaagctgcatgaccgtcttcggcagagccttcggtctgaacgaaacaatatgatgaacattgccaatgggcctcaccatcctaacccaccccccgagaatgtccagctggtgaatcaatacgtatctaaaaacgtcatctccagtgagcatattgttgagagagaagcagagacatccttttccaccagtcactatacttccacagcccatcactccactactgtcacccagactcctagccacagctggagcaacggacacactgaaagcatcctttccgaaagccactctgtaatcgtgatgtcatccgtagaaaacagtaggcacagcagcccaactgggggcccaagaggacgtcttaatggcacaggaggccctcgtgaatgtaacagcttcctcaggcatgccagagaaacccctgattcctaccgagactctcctcatagtgaaaggtatgtgtcagccatgaccaccccggctcgtatgtcacctgtagatttccacacgccaagctcccccaaatcgcccccttcggaaatgtctccacccgtgtccagcatgacggtgtccatgccttccatggcggtcagccccttcatggaagaagagagacctctacttctcgtgacaccaccaaggctgcgggagaagaagtttgaccatcaccctcagcagttcagctccttccaccacaaccccgcgcatgacagtaacagcctccctgctagccccttgaggatagtggaggatgaggagtatgaaacgacccaagagtacgagccagcccaagagcctgttaagaaactcgccaatagccggcgggccaaaagaaccaagcccaatggccacattgctaacagattggaagtggacagcaacacaagctcccagagcagtaactcagagagtgaaacagaagatgaaagagtaggtgaagatacgcctttcctgggcatacagaaccccctggcagccagtcttgaggcaacacctgccttccgcctggctgacagcaggactaacccagcaggccgcttctcgacacaggaagaaatccaggccaggctgtctagtgtaattgctaaccaagaccctattgctgtataaaacctaaataaacacatagattcacctgtaaaactttattttatataataaagtattccaccttaaattaaacaatttattttattttagcagttctgcaaatagaaaacaggaaaaaaacttttataaattaaatatatgtatgtaaaaatgtgttatgtgccatatgtagcaattttttacagtatttcaaaacgagaaagatatcaatggtgcctttatgttatgttatgtcgagagcaagttttgtacagttacagtgattgcttttccacagtatttctgcaaaacctctcatagattcagtttttgctggcttcttgtgcattgcattatgatgttgactggatgtatgatttgcaagacttgcaactgtccctctgtttgcttgtagtagcacccgatcagtatgtcttgtaatggcacatccatccagatatgcctctcttgtgtatgaagttttctttgctttcagaatatgaaatgagttgtgtctactctgccagccaaaggtttgcctcattgggctctgagataatagtagatccaacagcatgctactattaaatacagcaagaaactgcattaagtaatgttaaatattaggaagaaagtaatactgtgatttaaaaaaaact

SEQ ID NO: 17 - DNA, 2411 bp, Homo sapiens
ctctttctgctcagcttctgctccagagcttcatcttcaggaaccacctaagcatttttttccccagtaggagttcagtctgctcattatacctaattgcaaaggagctatattcagagcaagaataataatttcagattttttaactggacttcaaagagcaggaaagtatgcagattcctaaacacataagcattgaagatattacagctacatctacatccaccactgggacaagccatcttgtaaaatgtgcggagaaggagaaaactttctgtgtgaatggaggggagtgcttcatggtgaaagacctttcaaacccctcgagatacttgtgcaagtgccaacctggattcactggagcaagatgtactgagaatgtgcccatgaaagtccaaaaccaagaaaaggcggaggagctgtaccagaagagagtgctgaccataaccggcatctgcatcgccctccttgtggtcggcatcatgtgtgtggtggcctactgcaaaaccaagaaacagcggaaaaagctgcatgaccgtcttcggcagagccttcggtctgaacgaaacaatatgatgaacattgccaatgggcctcaccatcctaacccaccccccgagaatgtccagctggtgaatcaatacgtatctaaaaacgtcatctccagtgagcatattgttgagagagaagcagagacatccttttccaccagtcactatacttccacagcccatcactccactactgtcacccagactcctagccacagctggagcaacggacacactgaaagcatcctttccgaaagccactctgtaatcgtgatgtcatccgtagaaaacagtaggcacagcagcccaactgggggcccaagaggacgtcttaatggcacaggaggccctcgtgaatgtaacagcttcctcaggcatgccagagaaacccctgattcctaccgagactctcctcatagtgaaagacataaccttatagctgagctaaggagaaacaaggcacacagatccaaatgcatgcagatccagctatcagcaactcatcttagatcttcttccattccccatttgggcttcattctctaagaccccttggcctttaggaaggtatgtgtcagccatgaccaccccggctcgtatgtcacctgtagatttccacacgccaagctcccccaaatcgcccccttcggaaatgtctccacccgtgtccagcatgacggtgtccatgccttccatggcggtcagccccttcatggaagaagagagacctctacttctcgtgacaccaccaaggctgcgggagaagaagtttgaccatcaccctcagcagttcagctccttccaccacaaccccgcgcatgacagtaacagcctccctgctagccccttgaggatagtggaggatgaggagtatgaaacgacccaagagtacgagccagcccaagagcctgttaagaaactcgccaatagccggcgggccaaaagaaccaagcccaatggccacattgctaacagattggaagtggacagcaacacaagctcccagagcagtaactcagagagtgaaacagaagatgaaagagtaggtgaagatacgcctttcctgggcatacagaaccccctggcagccagtcttgaggcaacacctgccttccgcctggctgacagcaggactaacccagcaggccgcttctcgacacaggaagaaatccaggccaggctgtctagtgtaattgctaaccaagaccctattgctgtataaaacctaaataaacacatagattcacctgtaaaactttattttatataataaagtattccaccttaaattaaacaatttattttattttagcagttctgcaaatagaaaacaggaaaaaaacttttataaattaaatatatgtatgtaaaaatgtgttatgtgccatatgtagcaattttttacagtatttcaaaacgagaaagatatcaatggtgcctttatgttatgttatgtcgagagcaagttttgtacagttacagtgattgcttttccacagtatttctgcaaaacctctcatagattcagtttttgctggcttcttgtgcattgcattatgatgttgactggatgtatgatttgcaagacttgcaactgtccctctgtttgcttgtagtagcacccgatcagtatgtcttgtaatggcacatccatccagatatgcctctcttgtgtatgaagttttctttgctttcagaatatgaaatgagttgtgtctactctgccagccaaaggtttgcctcattgggctctgagataatagtagatccaacagcatgctactattaaatacagcaagaaactgcattaagtaatgttaaatattaggaagaaagtaatactgtgatttaaaaaaaact

SEQ ID NO: 18 - DNA, 1740 bp, Homo sapiens
gaggccaggggagggtgcgaaggaggcgcctgcctccaacctgcgggcgggaggtgggtggctgcggggcaattgaaaaagagccggcgaggagttccccgaaacttgttggaactccgggctcgcgcggaggccaggagctgagcggcggcggctgccggacgatgggagcgtgagcaggacggtgataacctctccccgatcgggttgcgagggcgccgggcagaggccaggacgcgagccgccagcggtgggacccatcgacgacttcccggggcgacaggagcagccccgagagccagggcgagcgcccgttccaggtggccggaccgcccgccgcgtccgcgccgcgctccctgcaggcaacgggagacgcccccgcgcagcgcgagcgcctcagcgcggccgctcgctctccccctcgagggacaaacttttcccaaacccgatccgagcccttggaccaaactcgcctgcgccgagagccgtccgcgtagagcgctccgtctccggcgagatgtccgagcgcaaagaaggcagaggcaaagggaagggcaagaagaaggagcgaggctccggcaagaagccggagtccgcggcgggcagccagagcccagccttgcctccccgattgaaagagatgaaaagccaggaatcggctgcaggttccaaactagtccttcggtgtgaaaccagttctgaatactcctctctcagattcaagtggttcaagaatgggaatgaattgaatcgaaaaaacaaaccacaaaatatcaagatacaaaaaaagccagggaagtcagaacttcgcattaacaaagcatcactggctgattctggagagtatatgtgcaaagtgatcagcaaattaggaaatgacagtgcctctgccaatatcaccatcgtggaatcaaacgagatcatcactggtatgccagcctcaactgaaggagcatatgtgtcttcagagtctcccattagaatatcagtatccacagaaggagcaaatacttcttcatctacatctacatccaccactgggacaagccatcttgtaaaatgtgcggagaaggagaaaactttctgtgtgaatggaggggagtgcttcatggtgaaagacctttcaaacccctcgagatacttgtgcaagtgcccaaatgagtttactggtgatcgctgccaaaactacgtaatggccagcttctacagtacgtccactccctttctgtctctgcctgaataggagcatgctcagttggtgctgctttcttgttgctgcatctcccctcagattccacctagagctagatgtgtcttaccagatctaatattgactgcctctgcctgtcgcatgagaacattaacaaaagcaattgtattacttcctctgttcgcgactagttggctctgagatactaataggtgtgtgaggctccggatgtttctggaattgatattgaatgatgtgatacaaattgatagtcaatatcaagcagtgaaatatgataataaaggcatttcaaagtctcacttttattgataaaataaaaatcattctactgaacagtccatcttctttatacaatgaccacatcctgaaaagggtgttgctaagctgtaaccgatatgcacttgaaatgatggtaagttaattttgattcagaatgtgttatttgtcacaaataaacataataaaaggagttcagatgtttttcttcattaaccaaaaaaaaaaaaaaa

SEQ ID NO: 19 - DNA, 3093 bp, Homo sapiens
gaggccaggggagggtgcgaaggaggcgcctgcctccaacctgcgggcgggaggtgggtggctgcggggcaattgaaaaagagccggcgaggagttccccgaaacttgttggaactccgggctcgcgcggaggccaggagctgagcggcggcggctgccggacgatgggagcgtgagcaggacggtgataacctctccccgatcgggttgcgagggcgccgggcagaggccaggacgcgagccgccagcggtgggacccatcgacgacttcccggggcgacaggagcagccccgagagccagggcgagcgcccgttccaggtggccggaccgcccgccgcgtccgcgccgcgctccctgcaggcaacgggagacgcccccgcgcagcgcgagcgcctcagcgcggccgctcgctctccccctcgagggacaaacttttcccaaacccgatccgagcccttggaccaaactcgcctgcgccgagagccgtccgcgtagagcgctccgtctccggcgagatgtccgagcgcaaagaaggcagaggcaaagggaagggcaagaagaaggagcgaggctccggcaagaagccggagtccgcggcgggcagccagagcccagccttgcctccccgattgaaagagatgaaaagccaggaatcggctgcaggttccaaactagtccttcggtgtgaaaccagttctgaatactcctctctcagattcaagtggttcaagaatgggaatgaattgaatcgaaaaaacaaaccacaaaatatcaagatacaaaaaaagccagggaagtcagaacttcgcattaacaaagcatcactggctgattctggagagtatatgtgcaaagtgatcagcaaattaggaaatgacagtgcctctgccaatatcaccatcgtggaatcaaacgagatcatcactggtatgccagcctcaactgaaggagcatatgtgtcttcagagtctcccattagaatatcagtatccacagaaggagcaaatacttcttcatctacatctacatccaccactgggacaagccatcttgtaaaatgtgcggagaaggagaaaactttctgtgtgaatggaggggagtgcttcatggtgaaagacctttcaaacccctcgagatacttgtgcaagtgcccaaatgagtttactggtgatcgctgccaaaactacgtaatggccagcttctacaagcatcttgggattgaatttatggaggcggaggagctgtaccagaagagagtgctgaccataaccggcatctgcatcgccctccttgtggtcggcatcatgtgtgtggtggcctactgcaaaaccaagaaacagcggaaaaagctgcatgaccgtcttcggcagagccttcggtctgaacgaaacaatatgatgaacattgccaatgggcctcaccatcctaacccaccccccgagaatgtccagctggtgaatcaatacgtatctaaaaacgtcatctccagtgagcatattgttgagagagaagcagagacatccttttccaccagtcactatacttccacagcccatcactccactactgtcacccagactcctagccacagctggagcaacggacacactgaaagcatcctttccgaaagccactctgtaatcgtgatgtcatccgtagaaaacagtaggcacagcagcccaactgggggcccaagaggacgtcttaatggcacaggaggccctcgtgaatgtaacagcttcctcaggcatgccagagaaacccctgattcctaccgagactctcctcatagtgaaaggtatgtgtcagccatgaccaccccggctcgtatgtcacctgtagatttccacacgccaagctcccccaaatcgcccccttcggaaatgtctccacccgtgtccagcatgacggtgtccatgccttccatggcggtcagccccttcatggaagaagagagacctctacttctcgtgacaccaccaaggctgcgggagaagaagtttgaccatcaccctcagcagttcagctccttccaccacaaccccgcgcatgacagtaacagcctccctgctagccccttgaggatagtggaggatgaggagtatgaaacgacccaagagtacgagccagcccaagagcctgttaagaaactcgccaatagccggcgggccaaaagaaccaagcccaatggccacattgctaacagattggaagtggacagcaacacaagctcccagagcagtaactcagagagtgaaacagaagatgaaagagtaggtgaagatacgcctttcctgggcatacagaaccccctggcagccagtcttgaggcaacacctgccttccgcctggctgacagcaggactaacccagcaggccgcttctcgacacaggaagaaatccaggccaggctgtctagtgtaattgctaaccaagaccctattgctgtataaaacctaaataaacacatagattcacctgtaaaactttattttatataataaagtattccaccttaaattaaacaatttattttattttagcagttctgcaaatagaaaacaggaaaaaaacttttataaattaaatatatgtatgtaaaaatgtgttatgtgccatatgtagcaattttttacagtatttcaaaacgagaaagatatcaatggtgcctttatgttatgttatgtcgagagcaagttttgtacagttacagtgattgcttttccacagtatttctgcaaaacctctcatagattcagtttttgctggcttcttgtgcattgcattatgatgttgactggatgtatgatttgcaagacttgcaactgtccctctgtttgcttgtagtagcacccgatcagtatgtcttgtaatggcacatccatccagatatgcctctcttgtgtatgaagttttctttgctttcagaatatgaaatgagttgtgtctactctgccagccaaaggtttgcctcattgggctctgagataatagtagatccaacagcatgctactattaaatacagcaagaaactgcattaagtaatgttaaatattaggaagaaagtaatactgtgatttaaaaaaaact

SEQ ID NO: 20 - DNA, 3078 bp, Homo sapiens
gaggccaggggagggtgcgaaggaggcgcctgcctccaacctgcgggcgggaggtgggtggctgcggggcaattgaaaaagagccggcgaggagttccccgaaacttgttggaactccgggctcgcgcggaggccaggagctgagcggcggcggctgccggacgatgggagcgtgagcaggacggtgataacctctccccgatcgggttgcgagggcgccgggcagaggccaggacgcgagccgccagcggtgggacccatcgacgacttcccggggcgacaggagcagccccgagagccagggcgagcgcccgttccaggtggccggaccgcccgccgcgtccgcgccgcgctccctgcaggcaacgggagacgcccccgcgcagcgcgagcgcctcagcgcggccgctcgctctccccctcgagggacaaacttttcccaaacccgatccgagcccttggaccaaactcgcctgcgccgagagccgtccgcgtagagcgctccgtctccggcgagatgtccgagcgcaaagaaggcagaggcaaagggaagggcaagaagaaggagcgaggctccggcaagaagccggagtccgcggcgggcagccagagcccagccttgcctccccgattgaaagagatgaaaagccaggaatcggctgcaggttccaaactagtccttcggtgtgaaaccagttctgaatactcctctctcagattcaagtggttcaagaatgggaatgaattgaatcgaaaaaacaaaccacaaaatatcaagatacaaaaaaagccagggaagtcagaacttcgcattaacaaagcatcactggctgattctggagagtatatgtgcaaagtgatcagcaaattaggaaatgacagtgcctctgccaatatcaccatcgtggaatcaaacgagatcatcactggtatgccagcctcaactgaaggagcatatgtgtcttcagagtctcccattagaatatcagtatccacagaaggagcaaatacttcttcatctacatctacatccaccactgggacaagccatcttgtaaaatgtgcggagaaggagaaaactttctgtgtgaatggaggggagtgcttcatggtgaaagacctttcaaacccctcgagatacttgtgcaagtgccaacctggattcactggagcaagatgtactgagaatgtgcccatgaaagtccaaaaccaagaaaaggcggaggagctgtaccagaagagagtgctgaccataaccggcatctgcatcgccctccttgtggtcggcatcatgtgtgtggtggcctactgcaaaaccaagaaacagcggaaaaagctgcatgaccgtcttcggcagagccttcggtctgaacgaaacaatatgatgaacattgccaatgggcctcaccatcctaacccaccccccgagaatgtccagctggtgaatcaatacgtatctaaaaacgtcatctccagtgagcatattgttgagagagaagcagagacatccttttccaccagtcactatacttccacagcccatcactccactactgtcacccagactcctagccacagctggagcaacggacacactgaaagcatcctttccgaaagccactctgtaatcgtgatgtcatccgtagaaaacagtaggcacagcagcccaactgggggcccaagaggacgtcttaatggcacaggaggccctcgtgaatgtaacagcttcctcaggcatgccagagaaacccctgattcctaccgagactctcctcatagtgaaaggtatgtgtcagccatgaccaccccggctcgtatgtcacctgtagatttccacacgccaagctcccccaaatcgcccccttcggaaatgtctccacccgtgtccagcatgacggtgtccatgccttccatggcggtcagccccttcatggaagaagagagacctctacttctcgtgacaccaccaaggctgcgggagaagaagtttgaccatcaccctcagcagttcagctccttccaccacaaccccgcgcatgacagtaacagcctccctgctagccccttgaggatagtggaggatgaggagtatgaaacgacccaagagtacgagccagcccaagagcctgttaagaaactcgccaatagccggcgggccaaaagaaccaagcccaatggccacattgctaacagattggaagtggacagcaacacaagctcccagagcagtaactcagagagtgaaacagaagatgaaagagtaggtgaagatacgcctttcctgggcatacagaaccccctggcagccagtcttgaggcaacacctgccttccgcctggctgacagcaggactaacccagcaggccgcttctcgacacaggaagaaatccaggccaggctgtctagtgtaattgctaaccaagaccctattgctgtataaaacctaaataaacacatagattcacctgtaaaactttattttatataataaagtattccaccttaaattaaacaatttattttattttagcagttctgcaaatagaaaacaggaaaaaaacttttataaattaaatatatgtatgtaaaaatgtgttatgtgccatatgtagcaattttttacagtatttcaaaacgagaaagatatcaatggtgcctttatgttatgttatgtcgagagcaagttttgtacagttacagtgattgcttttccacagtatttctgcaaaacctctcatagattcagtttttgctggcttcttgtgcattgcattatgatgttgactggatgtatgatttgcaagacttgcaactgtccctctgtttgcttgtagtagcacccgatcagtatgtcttgtaatggcacatccatccagatatgcctctcttgtgtatgaagttttctttgctttcagaatatgaaatgagttgtgtctactctgccagccaaaggtttgcctcattgggctctgagataatagtagatccaacagcatgctactattaaatacagcaagaaactgcattaagtaatgttaaatattaggaagaaagtaatactgtgatttaaaaaaaact

SEQ ID NO: 21 - DNA, 3220 bp, Homo sapiens
gaggccaggggagggtgcgaaggaggcgcctgcctccaacctgcgggcgggaggtgggtggctgcggggcaattgaaaaagagccggcgaggagttccccgaaacttgttggaactccgggctcgcgcggaggccaggagctgagcggcggcggctgccggacgatgggagcgtgagcaggacggtgataacctctccccgatcgggttgcgagggcgccgggcagaggccaggacgcgagccgccagcggtgggacccatcgacgacttcccggggcgacaggagcagccccgagagccagggcgagcgcccgttccaggtggccggaccgcccgccgcgtccgcgccgcgctccctgcaggcaacgggagacgcccccgcgcagcgcgagcgcctcagcgcggccgctcgctctccccctcgagggacaaacttttcccaaacccgatccgagcccttggaccaaactcgcctgcgccgagagccgtccgcgtagagcgctccgtctccggcgagatgtccgagcgcaaagaaggcagaggcaaagggaagggcaagaagaaggagcgaggctccggcaagaagccggagtccgcggcgggcagccagagcccagccttgcctccccgattgaaagagatgaaaagccaggaatcggctgcaggttccaaactagtccttcggtgtgaaaccagttctgaatactcctctctcagattcaagtggttcaagaatgggaatgaattgaatcgaaaaaacaaaccacaaaatatcaagatacaaaaaaagccagggaagtcagaacttcgcattaacaaagcatcactggctgattctggagagtatatgtgcaaagtgatcagcaaattaggaaatgacagtgcctctgccaatatcaccatcgtggaatcaaacgagatcatcactggtatgccagcctcaactgaaggagcatatgtgtcttcagagtctcccattagaatatcagtatccacagaaggagcaaatacttcttcatctacatctacatccaccactgggacaagccatcttgtaaaatgtgcggagaaggagaaaactttctgtgtgaatggaggggagtgcttcatggtgaaagacctttcaaacccctcgagatacttgtgcaagtgccaacctggattcactggagcaagatgtactgagaatgtgcccatgaaagtccaaaaccaagaaaaggcggaggagctgtaccagaagagagtgctgaccataaccggcatctgcatcgccctccttgtggtcggcatcatgtgtgtggtggcctactgcaaaaccaagaaacagcggaaaaagctgcatgaccgtcttcggcagagccttcggtctgaacgaaacaatatgatgaacattgccaatgggcctcaccatcctaacccaccccccgagaatgtccagctggtgaatcaatacgtatctaaaaacgtcatctccagtgagcatattgttgagagagaagcagagacatccttttccaccagtcactatacttccacagcccatcactccactactgtcacccagactcctagccacagctggagcaacggacacactgaaagcatcctttccgaaagccactctgtaatcgtgatgtcatccgtagaaaacagtaggcacagcagcccaactgggggcccaagaggacgtcttaatggcacaggaggccctcgtgaatgtaacagcttcctcaggcatgccagagaaacccctgattcctaccgagactctcctcatagtgaaagacataaccttatagctgagctaaggagaaacaaggcacacagatccaaatgcatgcagatccagctatcagcaactcatcttagatcttcttccattccccatttgggcttcattctctaagaccccttggcctttaggaaggtatgtgtcagccatgaccaccccggctcgtatgtcacctgtagatttccacacgccaagctcccccaaatcgcccccttcggaaatgtctccacccgtgtccagcatgacggtgtccatgccttccatggcggtcagccccttcatggaagaagagagacctctacttctcgtgacaccaccaaggctgcgggagaagaagtttgaccatcaccctcagcagttcagctccttccaccacaaccccgcgcatgacagtaacagcctccctgctagccccttgaggatagtggaggatgaggagtatgaaacgacccaagagtacgagccagcccaagagcctgttaagaaactcgccaatagccggcgggccaaaagaaccaagcccaatggccacattgctaacagattggaagtggacagcaacacaagctcccagagcagtaactcagagagtgaaacagaagatgaaagagtaggtgaagatacgcctttcctgggcatacagaaccccctggcagccagtcttgaggcaacacctgccttccgcctggctgacagcaggactaacccagcaggccgcttctcgacacaggaagaaatccaggccaggctgtctagtgtaattgctaaccaagaccctattgctgtataaaacctaaataaacacatagattcacctgtaaaactttattttatataataaagtattccaccttaaattaaacaatttattttattttagcagttctgcaaatagaaaacaggaaaaaaacttttataaattaaatatatgtatgtaaaaatgtgttatgtgccatatgtagcaattttttacagtatttcaaaacgagaaagatatcaatggtgcctttatgttatgttatgtcgagagcaagttttgtacagttacagtgattgcttttccacagtatttctgcaaaacctctcatagattcagtttttgctggcttcttgtgcattgcattatgatgttgactggatgtatgatttgcaagacttgcaactgtccctctgtttgcttgtagtagcacccgatcagtatgtcttgtaatggcacatccatccagatatgcctctcttgtgtatgaagttttctttgctttcagaatatgaaatgagttgtgtctactctgccagccaaaggtttgcctcattgggctctgagataatagtagatccaacagcatgctactattaaatacagcaagaaactgcattaagtaatgttaaatattaggaagaaagtaatactgtgatttaaaaaaaact

SEQ ID NO: 22 - DNA, 3677 bp, Homo sapiens
tcgcggaggcttggggcagccgggtagctcggaggtcgtggcgctgggggctagcaccagcgctctgtcgggaggcgcagcggttaggtggaccggtcagcggactcaccggccagggcgctcggtgctggaatttgatattcattgatccgggttttatccctcttcttttttcttaaacatttttttttaaaactgtattgtttctcgttttaatttatttttgcttgccattccccacttgaatcgggccgacggcttggggagattgctctacttccccaaatcactgtggattttggaaaccagcagaaagaggaaagaggtagcaagagctccagagagaagtcgaggaagagagagacggggtcagagagagcgcgcgggcgtgcgagcagcgaaagcgacaggggcaaagtgagtgacctgcttttgggggtgaccgccggagcgcggcgtgagccctcccccttgggatcccgcagctgaccagtcgcgctgacggacagacagacagacaccgcccccagccccagctaccacctcctccccggccggcggcggacagtggacgcggcggcgagccgcgggcaggggccggagcccgcgcccggaggcggggtggagggggtcggggctcgcggcgtcgcactgaaacttttcgtccaacttctgggctgttctcgcttcggaggagccgtggtccgcgcgggggaagccgagccgagcggagccgcgagaagtgctagctcgggccgggaggagccgcagccggaggagggggaggaggaagaagagaaggaagaggagagggggccgcagtggcgactcggcgctcggaagccgggctcatggacgggtgaggcggcggtgtgcgcagacagtgctccagccgcgcgcgctccccaggccctggcccgggcctcgggccggggaggaagagtagctcgccgaggcgccgaggagagcgggccgccccacagcccgagccggagagggagcgcgagccgcgccggccccggtcgggcctccgaaaccatgaactttctgctgtcttgggtgcattggagccttgccttgctgctctacctccaccatgccaagtggtcccaggctgcacccatggcagaaggaggagggcagaatcatcacgaagtggtgaagttcatggatgtctatcagcgcagctactgccatccaatcgagaccctggtggacatcttccaggagtaccctgatgagatcgagtacatcttcaagccatcctgtgtgcccctgatgcgatgcgggggctgctgcaatgacgagggcctggagtgtgtgcccactgaggagtccaacatcaccatgcagattatgcggatcaaacctcaccaaggccagcacataggagagatgagcttcctacagcacaacaaatgtgaatgcagaccaaagaaagatagagcaagacaagaaaaaaaatcagttcgaggaaagggaaaggggcaaaaacgaaagcgcaagaaatcccggtataagtcctggagcgtgtacgttggtgcccgctgctgtctaatgccctggagcctccctggcccccatccctgtgggccttgctcagagcggagaaagcatttgtttgtacaagatccgcagacgtgtaaatgttcctgcaaaaacacagactcgcgttgcaaggcgaggcagcttgagttaaacgaacgtacttgcagatgtgacaagccgaggcggtgagccgggcaggaggaaggagcctccctcagggtttcgggaaccagatctctcaccaggaaagactgatacagaacgatcgatacagaaaccacgctgccgccaccacaccatcaccatcgacagaacagtccttaatccagaaacctgaaatgaaggaagaggagactctgcgcagagcactttgggtccggagggcgagactccggcggaagcattcccgggcgggtgacccagcacggtccctcttggaattggattcgccattttatttttcttgctgctaaatcaccgagcccggaagattagagagttttatttctgggattcctgtagacacacccacccacatacatacatttatatatatatatattatatatatataaaaataaatatctctattttatatatataaaatatatatattctttttttaaattaacagtgctaatgttattggtgtcttcactggatgtatttgactgctgtggacttgagttgggaggggaatgttcccactcagatcctgacagggaagaggaggagatgagagactctggcatgatcttttttttgtcccacttggtggggccagggtcctctcccctgcccaggaatgtgcaaggccagggcatgggggcaaatatgacccagttttgggaacaccgacaaacccagccctggcgctgagcctctctaccccaggtcagacggacagaaagacagatcacaggtacagggatgaggacaccggctctgaccaggagtttggggagcttcaggacattgctgtgctttggggattccctccacatgctgcacgcgcatctcgcccccaggggcactgcctggaagattcaggagcctgggcggccttcgcttactctcacctgcttctgagttgcccaggagaccactggcagatgtcccggcgaagagaagagacacattgttggaagaagcagcccatgacagctccccttcctgggactcgccctcatcctcttcctgctccccttcctggggtgcagcctaaaaggacctatgtcctcacaccattgaaaccactagttctgtccccccaggagacctggttgtgtgtgtgtgagtggttgaccttcctccatcccctggtccttcccttcccttcccgaggcacagagagacagggcaggatccacgtgcccattgtggaggcagagaaaagagaaagtgttttatatacggtacttatttaatatccctttttaattagaaattaaaacagttaatttaattaaagagtagggttttttttcagtattcttggttaatatttaatttcaactatttatgagatgtatcttttgctctctcttgctctcttatttgtaccggtttttgtatataaaattcatgtttccaatctctctctccctgatcggtgacagtcactagcttatcttgaacagatatttaattttgctaacactcagctctgccctccccgatcccctggctccccagcacacattcctttgaaataaggtttcaatatacatctacatactatatatatatttggcaacttgtatttgtgtgtatatatatatatatatgtttatgtatatatgtgattctgataaaatagacattgctattctgttttttatatgtaaaaacaaaacaagaaaaaatagagaattctacatactaaatctctctccttttttaattttaatatttgttatcatttatttattggtgctactgtttatccgtaataattgtggggaaaagatattaacatcacgtctttgtctctagtgcagtttttcgagatattccgtagtacatatttatttttaaacaacgacaaagaaatacagatatatcttaaaaaaaaaaaagcattttgtattaaagaatttaattctgatctcaaaaaaaaaaaaaaaaaa

SEQ ID NO: 23 - DNA, 3677 bp, Homo sapiens; identical to SEQ ID NO: 22

SEQ ID NO: 24 - DNA, 3626 bp, Homo sapiens
tcgcggaggcttggggcagccgggtagctcggaggtcgtggcgctgggggctagcaccagcgctctgtcgggaggcgcagcggttaggtggaccggtcagcggactcaccggccagggcgctcggtgctggaatttgatattcattgatccgggttttatccctcttcttttttcttaaacatttttttttaaaactgtattgtttctcgttttaatttatttttgcttgccattccccacttgaatcgggccgacggcttggggagattgctctacttccccaaatcactgtggattttggaaaccagcagaaagaggaaagaggtagcaagagctccagagagaagtcgaggaagagagagacggggtcagagagagcgcgcgggcgtgcgagcagcgaaagcgacaggggcaaagtgagtgacctgcttttgggggtgaccgccggagcgcggcgtgagccctcccccttgggatcccgcagctgaccagtcgcgctgacggacagacagacagacaccgcccccagccccagctaccacctcctccccggccggcggcggacagtggacgcggcggcgagccgcgggcaggggccggagcccgcgcccggaggcggggtggagggggtcggggctcgcggcgtcgcactgaaacttttcgtccaacttctgggctgttctcgcttcggaggagccgtggtccgcgcgggggaagccgagccgagcggagccgcgagaagtgctagctcgggccgggaggagccgcagccggaggagggggaggaggaagaagagaaggaagaggagagggggccgcagtggcgactcggcgctcggaagccgggctcatggacgggtgaggcggcggtgtgcgcagacagtgctccagccgcgcgcgctccccaggccctggcccgggcctcgggccggggaggaagagtagctcgccgaggcgccgaggagagcgggccgccccacagcccgagccggagagggagcgcgagccgcgccggccccggtcgggcctccgaaaccatgaactttctgctgtcttgggtgcattggagccttgccttgctgctctacctccaccatgccaagtggtcccaggctgcacccatggcagaaggaggagggcagaatcatcacgaagtggtgaagttcatggatgtctatcagcgcagctactgccatccaatcgagaccctggtggacatcttccaggagtaccctgatgagatcgagtacatcttcaagccatcctgtgtgcccctgatgcgatgcgggggctgctgcaatgacgagggcctggagtgtgtgcccactgaggagtccaacatcaccatgcagattatgcggatcaaacctcaccaaggccagcacataggagagatgagcttcctacagcacaacaaatgtgaatgcagaccaaagaaagatagagcaagacaagaaaaaaaatcagttcgaggaaagggaaaggggcaaaaacgaaagcgcaagaaatcccggtataagtcctggagcgttccctgtgggccttgctcagagcggagaaagcatttgtttgtacaagatccgcagacgtgtaaatgttcctgcaaaaacacagactcgcgttgcaaggcgaggcagcttgagttaaacgaacgtacttgcagatgtgacaagccgaggcggtgagccgggcaggaggaaggagcctccctcagggtttcgggaaccagatctctcaccaggaaagactgatacagaacgatcgatacagaaaccacgctgccgccaccacaccatcaccatcgacagaacagtccttaatccagaaacctgaaatgaaggaagaggagactctgcgcagagcactttgggtccggagggcgagactccggcggaagcattcccgggcgggtgacccagcacggtccctcttggaattggattcgccattttatttttcttgctgctaaatcaccgagcccggaagattagagagttttatttctgggattcctgtagacacacccacccacatacatacatttatatatatatatattatatatatataaaaataaatatctctattttatatatataaaatatatatattctttttttaaattaacagtgctaatgttattggtgtcttcactggatgtatttgactgctgtggacttgagttgggaggggaatgttcccactcagatcctgacagggaagaggaggagatgagagactctggcatgatcttttttttgtcccacttggtggggccagggtcctctcccctgcccaggaatgtgcaaggccagggcatgggggcaaatatgacccagttttgggaacaccgacaaacccagccctggcgctgagcctctctaccccaggtcagacggacagaaagacagatcacaggtacagggatgaggacaccggctctgaccaggagtttggggagcttcaggacattgctgtgctttggggattccctccacatgctgcacgcgcatctcgcccccaggggcactgcctggaagattcaggagcctgggcggccttcgcttactctcacctgcttctgagttgcccaggagaccactggcagatgtcccggcgaagagaagagacacattgttggaagaagcagcccatgacagctccccttcctgggactcgccctcatcctcttcctgctccccttcctggggtgcagcctaaaaggacctatgtcctcacaccattgaaaccactagttctgtccccccaggagacctggttgtgtgtgtgtgagtggttgaccttcctccatcccctggtccttcccttcccttcccgaggcacagagagacagggcaggatccacgtgcccattgtggaggcagagaaaagagaaagtgttttatatacggtacttatttaatatccctttttaattagaaattaaaacagttaatttaattaaagagtagggttttttttcagtattcttggttaatatttaatttcaactatttatgagatgtatcttttgctctctcttgctctcttatttgtaccggtttttgtatataaaattcatgtttccaatctctctctccctgatcggtgacagtcactagcttatcttgaacagatatttaattttgctaacactcagctctgccctccccgatcccctggctccccagcacacattcctttgaaataaggtttcaatatacatctacatactatatatatatttggcaacttgtatttgtgtgtatatatatatatatatgtttatgtatatatgtgattctgataaaatagacattgctattctgttttttatatgtaaaaacaaaacaagaaaaaatagagaattctacatactaaatctctctccttttttaattttaatatttgttatcatttatttattggtgctactgtttatccgtaataattgtggggaaaagatattaacatcacgtctttgtctctagtgcagtttttcgagatattccgtagtacatatttatttttaaacaacgacaaagaaatacagatatatcttaaaaaaaaaaaagcattttgtattaaagaatttaattctgatctcaaaaaaaaaaaaaaaaaa

SEQ ID NO: 25 - DNA, 3626 bp, Homo sapiens; identical to SEQ ID NO: 24

SEQ ID NO: 26 - DNA, 3608 bp, Homo sapiens
tcgcggaggcttggggcagccgggtagctcggaggtcgtggcgctgggggctagcaccagcgctctgtcgggaggcgcagcggttaggtggaccggtcagcggactcaccggccagggcgctcggtgctggaatttgatattcattgatccgggttttatccctcttcttttttcttaaacatttttttttaaaactgtattgtttctcgttttaatttatttttgcttgccattccccacttgaatcgggccgacggcttggggagattgctctacttccccaaatcactgtggattttggaaaccagcagaaagaggaaagaggtagcaagagctccagagagaagtcgaggaagagagagacggggtcagagagagcgcgcgggcgtgcgagcagcgaaagcgacaggggcaaagtgagtgacctgcttttgggggtgaccgccggagcgcggcgtgagccctcccccttgggatcccgcagctgaccagtcgcgctgacggacagacagacagacaccgcccccagccccagctaccacctcctccccggccggcggcggacagtggacgcggcggcgagccgcgggcaggggccggagcccgcgcccggaggcggggtggagggggtcggggctcgcggcgtcgcactgaaacttttcgtccaacttctgggctgttctcgcttcggaggagccgtggtccgcgcgggggaagccgagccgagcggagccgcgagaagtgctagctcgggccgggaggagccgcagccggaggagggggaggaggaagaagagaaggaagaggagagggggccgcagtggcgactcggcgctcggaagccgggctcatggacgggtgaggcggcggtgtgcgcagacagtgctccagccgcgcgcgctccccaggccctggcccgggcctcgggccggggaggaagagtagctcgccgaggcgccgaggagagcgggccgccccacagcccgagccggagagggagcgcgagccgcgccggccccggtcgggcctccgaaaccatgaactttctgctgtcttgggtgcattggagccttgccttgctgctctacctccaccatgccaagtggtcccaggctgcacccatggcagaaggaggagggcagaatcatcacgaagtggtgaagttcatggatgtctatcagcgcagctactgccatccaatcgagaccctggtggacatcttccaggagtaccctgatgagatcgagtacatcttcaagccatcctgtgtgcccctgatgcgatgcgggggctgctgcaatgacgagggcctggagtgtgtgcccactgaggagtccaacatcaccatgcagattatgcggatcaaacctcaccaaggccagcacataggagagatgagcttcctacagcacaacaaatgtgaatgcagaccaaagaaagatagagcaagacaagaaaaaaaatcagttcgaggaaagggaaaggggcaaaaacgaaagcgcaagaaatcccgtccctgtgggccttgctcagagcggagaaagcatttgtttgtacaagatccgcagacgtgtaaatgttcctgcaaaaacacagactcgcgttgcaaggcgaggcagcttgagttaaacgaacgtacttgcagatgtgacaagccgaggcggtgagccgggcaggaggaaggagcctccctcagggtttcgggaaccagatctctcaccaggaaagactgatacagaacgatcgatacagaaaccacgctgccgccaccacaccatcaccatcgacagaacagtccttaatccagaaacctgaaatgaaggaagaggagactctgcgcagagcactttgggtccggagggcgagactccggcggaagcattcccgggcgggtgacccagcacggtccctcttggaattggattcgccattttatttttcttgctgctaaatcaccgagcccggaagattagagagttttatttctgggattcctgtagacacacccacccacatacatacatttatatatatatatattatatatatataaaaataaatatctctattttatatatataaaatatatatattctttttttaaattaacagtgctaatgttattggtgtcttcactggatgtatttgactgctgtggacttgagttgggaggggaatgttcccactcagatcctgacagggaagaggaggagatgagagactctggcatgatcttttttttgtcccacttggtggggccagggtcctctcccctgcccaggaatgtgcaaggccagggcatgggggcaaatatgacccagttttgggaacaccgacaaacccagccctggcgctgagcctctctaccccaggtcagacggacagaaagacagatcacaggtacagggatgaggacaccggctctgaccaggagtttggggagcttcaggacattgctgtgctttggggattccctccacatgctgcacgcgcatctcgcccccaggggcactgcctggaagattcaggagcctgggcggccttcgcttactctcacctgcttctgagttgcccaggagaccactggcagatgtcccggcgaagagaagagacacattgttggaagaagcagcccatgacagctccccttcctgggactcgccctcatcctcttcctgctccccttcctggggtgcagcctaaaaggacctatgtcctcacaccattgaaaccactagttctgtccccccaggagacctggttgtgtgtgtgtgagtggttgaccttcctccatcccctggtccttcccttcccttcccgaggcacagagagacagggcaggatccacgtgcccattgtggaggcagagaaaagagaaagtgttttatatacggtacttatttaatatccctttttaattagaaattaaaacagttaatttaattaaagagtagggttttttttcagtattcttggttaatatttaatttcaactatttatgagatgtatcttttgctctctcttgctctcttatttgtaccggtttttgtatataaaattcatgtttccaatctctctctccctgatcggtgacagtcactagcttatcttgaacagatatttaattttgctaacactcagctctgccctccccgatcccctggctccccagcacacattcctttgaaataaggtttcaatatacatctacatactatatatatatttggcaacttgtatttgtgtgtatatatatatatatatgtttatgtatatatgtgattctgataaaatagacattgctattctgttttttatatgtaaaaacaaaacaagaaaaaatagagaattctacatactaaatctctctccttttttaattttaatatttgttatcatttatttattggtgctactgtttatccgtaataattgtggggaaaagatattaacatcacgtctttgtctctagtgcagtttttcgagatattccgtagtacatatttatttttaaacaacgacaaagaaatacagatatatcttaaaaaaaaaaaagcattttgtattaaagaatttaattctgatctcaaaaaaaaaaaaaaaaaa

SEQ ID NO: 27 - DNA, 3608 bp, Homo sapiens; identical to SEQ ID NO: 26

SEQ ID NO: 28 - DNA, 3554 bp, Homo sapiens
tcgcggaggcttggggcagccgggtagctcggaggtcgtggcgctgggggctagcaccagcgctctgtcgggaggcgcagcggttaggtggaccggtcagcggactcaccggccagggcgctcggtgctggaatttgatattcattgatccgggttttatccctcttcttttttcttaaacatttttttttaaaactgtattgtttctcgttttaatttatttttgcttgccattccccacttgaatcgggccgacggcttggggagattgctctacttccccaaatcactgtggattttggaaaccagcagaaagaggaaagaggtagcaagagctccagagagaagtcgaggaagagagagacggggtcagagagagcgcgcgggcgtgcgagcagcgaaagcgacaggggcaaagtgagtgacctgcttttgggggtgaccgccggagcgcggcgtgagccctcccccttgggatcccgcagctgaccagtcgcgctgacggacagacagacagacaccgcccccagccccagctaccacctcctccccggccggcggcggacagtggacgcggcggcgagccgcgggcaggggccggagcccgcgcccggaggcggggtggagggggtcggggctcgcggcgtcgcactgaaacttttcgtccaacttctgggctgttctcgcttcggaggagccgtggtccgcgcgggggaagccgagccgagcggagccgcgagaagtgctagctcgggccgggaggagccgcagccggaggagggggaggaggaagaagagaaggaagaggagagggggccgcagtggcgactcggcgctcggaagccgggctcatggacgggtgaggcggcggtgtgcgcagacagtgctccagccgcgcgcgctccccaggccctggcccgggcctcgggccggggaggaagagtagctcgccgaggcgccgaggagagcgggccgccccacagcccgagccggagagggagcgcgagccgcgccggccccggtcgggcctccgaaaccatgaactttctgctgtcttgggtgcattggagccttgccttgctgctctacctccaccatgccaagtggtcccaggctgcacccatggcagaaggaggagggcagaatcatcacgaagtggtgaagttcatggatgtctatcagcgcagctactgccatccaatcgagaccctggtggacatcttccaggagtaccctgatgagatcgagtacatcttcaagccatcctgtgtgcccctgatgcgatgcgggggctgctgcaatgacgagggcctggagtgtgtgcccactgaggagtccaacatcaccatgcagattatgcggatcaaacctcaccaaggccagcacataggagagatgagcttcctacagcacaacaaatgtgaatgcagaccaaagaaagatagagcaagacaagaaaatccctgtgggccttgctcagagcggagaaagcatttgtttgtacaagatccgcagacgtgtaaatgttcctgcaaaaacacagactcgcgttgcaaggcgaggcagcttgagttaaacgaacgtacttgcagatgtgacaagccgaggcggtgagccgggcaggaggaaggagcctccctcagggtttcgggaaccagatctctcaccaggaaagactgatacagaacgatcgatacagaaaccacgctgccgccaccacaccatcaccatcgacagaacagtccttaatccagaaacctgaaatgaaggaagaggagactctgcgcagagcactttgggtccggagggcgagactccggcggaagcattcccgggcgggtgacccagcacggtccctcttggaattggattcgccattttatttttcttgctgctaaatcaccgagcccggaagattagagagttttatttctgggattcctgtagacacacccacccacatacatacatttatatatatatatattatatatatataaaaataaatatctctattttatatatataaaatatatatattctttttttaaattaacagtgctaatgttattggtgtcttcactggatgtatttgactgctgtggacttgagttgggaggggaatgttcccactcagatcctgacagggaagaggaggagatgagagactctggcatgatcttttttttgtcccacttggtggggccagggtcctctcccctgcccaggaatgtgcaaggccagggcatgggggcaaatatgacccagttttgggaacaccgacaaacccagccctggcgctgagcctctctaccccaggtcagacggacagaaagacagatcacaggtacagggatgaggacaccggctctgaccaggagtttggggagcttcaggacattgctgtgctttggggattccctccacatgctgcacgcgcatctcgcccccaggggcactgcctggaagattcaggagcctgggcggccttcgcttactctcacctgcttctgagttgcccaggagaccactggcagatgtcccggcgaagagaagagacacattgttggaagaagcagcccatgacagctccccttcctgggactcgccctcatcctcttcctgctccccttcctggggtgcagcctaaaaggacctatgtcctcacaccattgaaaccactagttctgtccccccaggagacctggttgtgtgtgtgtgagtggttgaccttcctccatcccctggtccttcccttcccttcccgaggcacagagagacagggcaggatccacgtgcccattgtggaggcagagaaaagagaaagtgttttatatacggtacttatttaatatccctttttaattagaaattaaaacagttaatttaattaaagagtagggttttttttcagtattcttggttaatatttaatttcaactatttatgagatgtatcttttgctctctcttgctctcttatttgtaccggtttttgtatataaaattcatgtttccaatctctctctccctgatcggtgacagtcactagcttatcttgaacagatatttaattttgctaacactcagctctgccctccccgatcccctggctccccagcacacattcctttgaaataaggtttcaatatacatctacatactatatatatatttggcaacttgtatttgtgtgtatatatatatatatatgtttatgtatatatgtgattctgataaaatagacattgctattctgttttttatatgtaaaaacaaaacaagaaaaaatagagaattctacatactaaatctctctccttttttaattttaatatttgttatcatttatttattggtgctactgtttatccgtaataattgtggggaaaagatattaacatcacgtctttgtctctagtgcagtttttcgagatattccgtagtacatatttatttttaaacaacgacaaagaaatacagatatatcttaaaaaaaaaaaagcattttgtattaaagaatttaattctgatctcaaaaaaaaaaaaaaaaaa

SEQ ID NO: 29 - DNA, 3554 bp, Homo sapiens; identical to SEQ ID NO: 28

SEQ ID NO: 30 - DNA, 3519 bp, Homo sapiens
tcgcggaggcttggggcagccgggtagctcggaggtcgtggcgctgggggctagcaccagcgctctgtcgggaggcgcagcggttaggtggaccggtcagcggactcaccggccagggcgctcggtgctggaatttgatattcattgatccgggttttatccctcttcttttttcttaaacatttttttttaaaactgtattgtttctcgttttaatttatttttgcttgccattccccacttgaatcgggccgacggcttggggagattgctctacttccccaaatcactgtggattttggaaaccagcagaaagaggaaagaggtagcaagagctccagagagaagtcgaggaagagagagacggggtcagagagagcgcgcgggcgtgcgagcagcgaaagcgacaggggcaaagtgagtgacctgcttttgggggtgaccgccggagcgcggcgtgagccctcccccttgggatcccgcagctgaccagtcgcgctgacggacagacagacagacaccgcccccagccccagctaccacctcctccccggccggcggcggacagtggacgcggcggcgagccgcgggcaggggccggagcccgcgcccggaggcggggtggagggggtcggggctcgcggcgtcgcactgaaacttttcgtccaacttctgggctgttctcgcttcggaggagccgtggtccgcgcgggggaagccgagccgagcggagccgcgagaagtgctagctcgggccgggaggagccgcagccggaggagggggaggaggaagaagagaaggaagaggagagggggccgcagtggcgactcggcgctcggaagccgggctcatggacgggtgaggcggcggtgtgcgcagacagtgctccagccgcgcgcgctccccaggccctggcccgggcctcgggccggggaggaagagtagctcgccgaggcgccgaggagagcgggccgccccacagcccgagccggagagggagcgcgagccgcgccggccccggtcgggcctccgaaaccatgaactttctgctgtcttgggtgcattggagccttgccttgctgctctacctccaccatgccaagtggtcccaggctgcacccatggcagaaggaggagggcagaatcatcacgaagtggtgaagttcatggatgtctatcagcgcagctactgccatccaatcgagaccctggtggacatcttccaggagtaccctgatgagatcgagtacatcttcaagccatcctgtgtgcccctgatgcgatgcgggggctgctgcaatgacgagggcctggagtgtgtgcccactgaggagtccaacatcaccatgcagattatgcggatcaaacctcaccaaggccagcacataggagagatgagcttcctacagcacaacaaatgtgaatgcagaccaaagaaagatagagcaagacaagaaaatccctgtgggccttgctcagagcggagaaagcatttgtttgtacaagatccgcagacgtgtaaatgttcctgcaaaaacacagactcgcgttgcaagatgtgacaagccgaggcggtgagccgggcaggaggaaggagcctccctcagggtttcgggaaccagatctctcaccaggaaagactgatacagaacgatcgatacagaaaccacgctgccgccaccacaccatcaccatcgacagaacagtccttaatccagaaacctgaaatgaaggaagaggagactctgcgcagagcactttgggtccggagggcgagactccggcggaagcattcccgggcgggtgacccagcacggtccctcttggaattggattcgccattttatttttcttgctgctaaatcaccgagcccggaagattagagagttttatttctgggattcctgtagacacacccacccacatacatacatttatatatatatatattatatatatataaaaataaatatctctattttatatatataaaatatatatattctttttttaaattaacagtgctaatgttattggtgtcttcactggatgtatttgactgctgtggacttgagttgggaggggaatgttcccactcagatcctgacagggaagaggaggagatgagagactctggcatgatcttttttttgtcccacttggtggggccagggtcctctcccctgcccaggaatgtgcaaggccagggcatgggggcaaatatgacccagttttgggaacaccgacaaacccagccctggcgctgagcctctctaccccaggtcagacggacagaaagacagatcacaggtacagggatgaggacaccggctctgaccaggagtttggggagcttcaggacattgctgtgctttggggattccctccacatgctgcacgcgcatctcgcccccaggggcactgcctggaagattcaggagcctgggcggccttcgcttactctcacctgcttctgagttgcccaggagaccactggcagatgtcccggcgaagagaagagacacattgttggaagaagcagcccatgacagctccccttcctgggactcgccctcatcctcttcctgctccccttcctggggtgcagcctaaaaggacctatgtcctcacaccattgaaaccactagttctgtccccccaggagacctggttgtgtgtgtgtgagtggttgaccttcctccatcccctggtccttcccttcccttcccgaggcacagagagacagggcaggatccacgtgcccattgtggaggcagagaaaagagaaagtgttttatatacggtacttatttaatatccctttttaattagaaattaaaacagttaatttaattaaagagtagggttttttttcagtattcttggttaatatttaatttcaactatttatgagatgtatcttttgctctctcttgctctcttatttgtaccggtttttgtatataaaattcatgtttccaatctctctctccctgatcggtgacagtcactagcttatcttgaacagatatttaattttgctaacactcagctctgccctccccgatcccctggctccccagcacacattcctttgaaataaggtttcaatatacatctacatactatatatatatttggcaacttgtatttgtgtgtatatatatatatatatgtttatgtatatatgtgattctgataaaatagacattgctattctgttttttatatgtaaaaacaaaacaagaaaaaatagagaattctacatactaaatctctctccttttttaattttaatatttgttatcatttatttattggtgctactgtttatccgtaataattgtggggaaaagatattaacatcacgtctttgtctctagtgcagtttttcgagatattccgtagtacatatttatttttaaacaacgacaaagaaatacagatatatcttaaaaaaaaaaaagcattttgtattaaagaatttaattctgatctcaaaaaaaaaaaaaaaaaa

SEQ ID NO: 31 - DNA, 3519 bp, Homo sapiens; identical to SEQ ID NO: 30

SEQ ID NO: 32 - DNA, 3422 bp, Homo sapiens
tcgcggaggcttggggcagccgggtagctcggaggtcgtggcgctgggggctagcaccagcgctctgtcgggaggcgcagcggttaggtggaccggtcagcggactcaccggccagggcgctcggtgctggaatttgatattcattgatccgggttttatccctcttcttttttcttaaacatttttttttaaaactgtattgtttctcgttttaatttatttttgcttgccattccccacttgaatcgggccgacggcttggggagattgctctacttccccaaatcactgtggattttggaaaccagcagaaagaggaaagaggtagcaagagctccagagagaagtcgaggaagagagagacggggtcagagagagcgcgcgggcgtgcgagcagcgaaagcgacaggggcaaagtgagtgacctgcttttgggggtgaccgccggagcgcggcgtgagccctcccccttgggatcccgcagctgaccagtcgcgctgacggacagacagacagacaccgcccccagccccagctaccacctcctccccggccggcggcggacagtggacgcggcggcgagccgcgggcaggggccggagcccgcgcccggaggcggggtggagggggtcggggctcgcggcgtcgcactgaaacttttcgtccaacttctgggctgttctcgcttcggaggagccgtggtccgcgcgggggaagccgagccgagcggagccgcgagaagtgctagctcgggccgggaggagccgcagccggaggagggggaggaggaagaagagaaggaagaggagagggggccgcagtggcgactcggcgctcggaagccgggctcatggacgggtgaggcggcggtgtgcgcagacagtgctccagccgcgcgcgctccccaggccctggcccgggcctcgggccggggaggaagagtagctcgccgaggcgccgaggagagcgggccgccccacagcccgagccggagagggagcgcgagccgcgccggccccggtcgggcctccgaaaccatgaactttctgctgtcttgggtgcattggagccttgccttgctgctctacctccaccatgccaagtggtcccaggctgcacccatggcagaaggaggagggcagaatcatcacgaagtggtgaagttcatggatgtctatcagcgcagctactgccatccaatcgagaccctggtggacatcttccaggagtaccctgatgagatcgagtacatcttcaagccatcctgtgtgcccctgatgcgatgcgggggctgctgcaatgacgagggcctggagtgtgtgcccactgaggagtccaacatcaccatgcagattatgcggatcaaacctcaccaaggccagcacataggagagatgagcttcctacagcacaacaaatgtgaatgcagaccaaagaaagatagagcaagacaagaaaaatgtgacaagccgaggcggtgagccgggcaggaggaaggagcctccctcagggtttcgggaaccagatctctcaccaggaaagactgatacagaacgatcgatacagaaaccacgctgccgccaccacaccatcaccatcgacagaacagtccttaatccagaaacctgaaatgaaggaagaggagactctgcgcagagcactttgggtccggagggcgagactccggcggaagcattcccgggcgggtgacccagcacggtccctcttggaattggattcgccattttatttttcttgctgctaaatcaccgagcccggaagattagagagttttatttctgggattcctgtagacacacccacccacatacatacatttatatatatatatattatatatatataaaaataaatatctctattttatatatataaaatatatatattctttttttaaattaacagtgctaatgttattggtgtcttcactggatgtatttgactgctgtggacttgagttgggaggggaatgttcccactcagatcctgacagggaagaggaggagatgagagactctggcatgatcttttttttgtcccacttggtggggccagggtcctctcccctgcccaggaatgtgcaaggccagggcatgggggcaaatatgacccagttttgggaacaccgacaaacccagccctggcgctgagcctctctaccccaggtcagacggacagaaagacagatcacaggtacagggatgaggacaccggctctgaccaggagtttggggagcttcaggacattgctgtgctttggggattccctccacatgctgcacgcgcatctcgcccccaggggcactgcctggaagattcaggagcctgggcggccttcgcttactctcacctgcttctgagttgcccaggagaccactggcagatgtcccggcgaagagaagagacacattgttggaagaagcagcccatgacagctccccttcctgggactcgccctcatcctcttcctgctccccttcctggggtgcagcctaaaaggacctatgtcctcacaccattgaaaccactagttctgtccccccaggagacctggttgtgtgtgtgtgagtggttgaccttcctccatcccctggtccttcccttcccttcccgaggcacagagagacagggcaggatccacgtgcccattgtggaggcagagaaaagagaaagtgttttatatacggtacttatttaatatccctttttaattagaaattaaaacagttaatttaattaaagagtagggttttttttcagtattcttggttaatatttaatttcaactatttatgagatgtatcttttgctctctcttgctctcttatttgtaccggtttttgtatataaaattcatgtttccaatctctctctccctgatcggtgacagtcactagcttatcttgaacagatatttaattttgctaacactcagctctgccctccccgatcccctggctccccagcacacattcctttgaaataaggtttcaatatacatctacatactatatatatatttggcaacttgtatttgtgtgtatatatatatatatatgtttatgtatatatgtgattctgataaaatagacattgctattctgttttttatatgtaaaaacaaaacaagaaaaaatagagaattctacatactaaatctctctccttttttaattttaatatttgttatcatttatttattggtgctactgtttatccgtaataattgtggggaaaagatattaacatcacgtctttgtctctagtgcagtttttcgagatattccgtagtacatatttatttttaaacaacgacaaagaaatacagatatatcttaaaaaaaaaaaagcattttgtattaaagaatttaattctgatctcaaaaaaaaaaaaaaaaaa

SEQ ID NO: 33 - DNA, 3422 bp, Homo sapiens; identical to SEQ ID NO: 32

SEQ ID NO: 34 - DNA, 3488 bp, Homo sapiens
tcgcggaggcttggggcagccgggtagctcggaggtcgtggcgctgggggctagcaccagcgctctgtcgggaggcgcagcggttaggtggaccggtcagcggactcaccggccagggcgctcggtgctggaatttgatattcattgatccgggttttatccctcttcttttttcttaaacatttttttttaaaactgtattgtttctcgttttaatttatttttgcttgccattccccacttgaatcgggccgacggcttggggagattgctctacttccccaaatcactgtggattttggaaaccagcagaaagaggaaagaggtagcaagagctccagagagaagtcgaggaagagagagacggggtcagagagagcgcgcgggcgtgcgagcagcgaaagcgacaggggcaaagtgagtgacctgcttttgggggtgaccgccggagcgcggcgtgagccctcccccttgggatcccgcagctgaccagtcgcgctgacggacagacagacagacaccgcccccagccccagctaccacctcctccccggccggcggcggacagtggacgcggcggcgagccgcgggcaggggccggagcccgcgcccggaggcggggtggagggggtcggggctcgcggcgtcgcactgaaacttttcgtccaacttctgggctgttctcgcttcggaggagccgtggtccgcgcgggggaagccgagccgagcggagccgcgagaagtgctagctcgggccgggaggagccgcagccggaggagggggaggaggaagaagagaaggaagaggagagggggccgcagtggcgactcggcgctcggaagccgggctcatggacgggtgaggcggcggtgtgcgcagacagtgctccagccgcgcgcgctccccaggccctggcccgggcctcgggccggggaggaagagtagctcgccgaggcgccgaggagagcgggccgccccacagcccgagccggagagggagcgcgagccgcgccggccccggtcgggcctccgaaaccatgaactttctgctgtcttgggtgcattggagccttgccttgctgctctacctccaccatgccaagtggtcccaggctgcacccatggcagaaggaggagggcagaatcatcacgaagtggtgaagttcatggatgtctatcagcgcagctactgccatccaatcgagaccctggtggacatcttccaggagtaccctgatgagatcgagtacatcttcaagccatcctgtgtgcccctgatgcgatgcgggggctgctgcaatgacgagggcctggagtgtgtgcccactgaggagtccaacatcaccatgcagattatgcggatcaaacctcaccaaggccagcacataggagagatgagcttcctacagcacaacaaatgtgaatgcagaccaaagaaagatagagcaagacaagaaaatccctgtgggccttgctcagagcggagaaagcatttgtttgtacaagatccgcagacgtgtaaatgttcctgcaaaaacacagactcgcgttgcaaggcgaggcagcttgagttaaacgaacgtacttgcagatctctcaccaggaaagactgatacagaacgatcgatacagaaaccacgctgccgccaccacaccatcaccatcgacagaacagtccttaatccagaaacctgaaatgaaggaagaggagactctgcgcagagcactttgggtccggagggcgagactccggcggaagcattcccgggcgggtgacccagcacggtccctcttggaattggattcgccattttatttttcttgctgctaaatcaccgagcccggaagattagagagttttatttctgggattcctgtagacacacccacccacatacatacatttatatatatatatattatatatatataaaaataaatatctctattttatatatataaaatatatatattctttttttaaattaacagtgctaatgttattggtgtcttcactggatgtatttgactgctgtggacttgagttgggaggggaatgttcccactcagatcctgacagggaagaggaggagatgagagactctggcatgatcttttttttgtcccacttggtggggccagggtcctctcccctgcccaggaatgtgcaaggccagggcatgggggcaaatatgacccagttttgggaacaccgacaaacccagccctggcgctgagcctctctaccccaggtcagacggacagaaagacagatcacaggtacagggatgaggacaccggctctgaccaggagtttggggagcttcaggacattgctgtgctttggggattccctccacatgctgcacgcgcatctcgcccccaggggcactgcctggaagattcaggagcctgggcggccttcgcttactctcacctgcttctgagttgcccaggagaccactggcagatgtcccggcgaagagaagagacacattgttggaagaagcagcccatgacagctccccttcctgggactcgccctcatcctcttcctgctccccttcctggggtgcagcctaaaaggacctatgtcctcacaccattgaaaccactagttctgtccccccaggagacctggttgtgtgtgtgtgagtggttgaccttcctccatcccctggtccttcccttcccttcccgaggcacagagagacagggcaggatccacgtgcccattgtggaggcagagaaaagagaaagtgttttatatacggtacttatttaatatccctttttaattagaaattaaaacagttaatttaattaaagagtagggttttttttcagtattcttggttaatatttaatttcaactatttatgagatgtatcttttgctctctcttgctctcttatttgtaccggtttttgtatataaaattcatgtttccaatctctctctccctgatcggtgacagtcactagcttatcttgaacagatatttaattttgctaacactcagctctgccctccccgatcccctggctccccagcacacattcctttgaaataaggtttcaatatacatctacatactatatatatatttggcaacttgtatttgtgtgtatatatatatatatatgtttatgtatatatgtgattctgataaaatagacattgctattctgttttttatatgtaaaaacaaaacaagaaaaaatagagaattctacatactaaatctctctccttttttaattttaatatttgttatcatttatttattggtgctactgtttatccgtaataattgtggggaaaagatattaacatcacgtctttgtctctagtgcagtttttcgagatattccgtagtacatatttatttttaaacaacgacaaagaaatacagatatatcttaaaaaaaaaaaagcattttgtattaaagaatttaattctgatctcaaaaaaaaaaaaaaaaaa

SEQ ID NO: 35 - DNA, 3488 bp, Homo sapiens; identical to SEQ ID NO: 34

SEQ ID NO: 36 - DNA, 3392 bp, Homo sapiens
tcgcggaggcttggggcagccgggtagctcggaggtcgtggcgctgggggctagcaccagcgctctgtcgggaggcgcagcggttaggtggaccggtcagcggactcaccggccagggcgctcggtgctggaatttgatattcattgatccgggttttatccctcttcttttttcttaaacatttttttttaaaactgtattgtttctcgttttaatttatttttgcttgccattccccacttgaatcgggccgacggcttggggagattgctctacttccccaaatcactgtggattttggaaaccagcagaaagaggaaagaggtagcaagagctccagagagaagtcgaggaagagagagacggggtcagagagagcgcgcgggcgtgcgagcagcgaaagcgacaggggcaaagtgagtgacctgcttttgggggtgaccgccggagcgcggcgtgagccctcccccttgggatcccgcagctgaccagtcgcgctgacggacagacagacagacaccgcccccagccccagctaccacctcctccccggccggcggcggacagtggacgcggcggcgagccgcgggcaggggccggagcccgcgcccggaggcggggtggagggggtcggggctcgcggcgtcgcactgaaacttttcgtccaacttctgggctgttctcgcttcggaggagccgtggtccgcgcgggggaagccgagccgagcggagccgcgagaagtgctagctcgggccgggaggagccgcagccggaggagggggaggaggaagaagagaaggaagaggagagggggccgcagtggcgactcggcgctcggaagccgggctcatggacgggtgaggcggcggtgtgcgcagacagtgctccagccgcgcgcgctccccaggccctggcccgggcctcgggccggggaggaagagtagctcgccgaggcgccgaggagagcgggccgccccacagcccgagccggagagggagcgcgagccgcgccggccccggtcgggcctccgaaaccatgaactttctgctgtcttgggtgcattggagccttgccttgctgctctacctccaccatgccaagtggtcccaggctgcacccatggcagaaggaggagggcagaatcatcacgaagtggtgaagttcatggatgtctatcagcgcagctactgccatccaatcgagaccctggtggacatcttccaggagtaccctgatgagatcgagtacatcttcaagccatcctgtgtgcccctgatgcgatgcgggggctgctgcaatgacgagggcctggagtgtgtgcccactgaggagtccaacatcaccatgcagattatgcggatcaaacctcaccaaggccagcacataggagagatgagcttcctacagcacaacaaatgtgaatgcagatgtgacaagccgaggcggtgagccgggcaggaggaaggagcctccctcagggtttcgggaaccagatctctcaccaggaaagactgatacagaacgatcgatacagaaaccacgctgccgccaccacaccatcaccatcgacagaacagtccttaatccagaaacctgaaatgaaggaagaggagactctgcgcagagcactttgggtccggagggcgagactccggcggaagcattcccgggcgggtgacccagcacggtccctcttggaattggattcgccattttatttttcttgctgctaaatcaccgagcccggaagattagagagttttatttctgggattcctgtagacacacccacccacatacatacatttatatatatatatattatatatatataaaaataaatatctctattttatatatataaaatatatatattctttttttaaattaacagtgctaatgttattggtgtcttcactggatgtatttgactgctgtggacttgagttgggaggggaatgttcccactcagatcctgacagggaagaggaggagatgagagactctggcatgatcttttttttgtcccacttggtggggccagggtcctctcccctgcccaggaatgtgcaaggccagggcatgggggcaaatatgacccagttttgggaacaccgacaaacccagccctggcgctgagcctctctaccccaggtcagacggacagaaagacagatcacaggtacagggatgaggacaccggctctgaccaggagtttggggagcttcaggacattgctgtgctttggggattccctccacatgctgcacgcgcatctcgcccccaggggcactgcctggaagattcaggagcctgggcggccttcgcttactctcacctgcttctgagttgcccaggagaccactggcagatgtcccggcgaagagaagagacacattgttggaagaagcagcccatgacagctccccttcctgggactcgccctcatcctcttcctgctccccttcctggggtgcagcctaaaaggacctatgtcctcacaccattgaaaccactagttctgtccccccaggagacctggttgtgtgtgtgtgagtggttgaccttcctccatcccctggtccttcccttcccttcccgaggcacagagagacagggcaggatccacgtgcccattgtggaggcagagaaaagagaaagtgttttatatacggtacttatttaatatccctttttaattagaaattaaaacagttaatttaattaaagagtagggttttttttcagtattcttggttaatatttaatttcaactatttatgagatgtatcttttgctctctcttgctctcttatttgtaccggtttttgtatataaaattcatgtttccaatctctctctccctgatcggtgacagtcactagcttatcttgaacagatatttaattttgctaacactcagctctgccctccccgatcccctggctccccagcacacattcctttgaaataaggtttcaatatacatctacatactatatatatatttggcaacttgtatttgtgtgtatatatatatatatatgtttatgtatatatgtgattctgataaaatagacattgctattctgttttttatatgtaaaaacaaaacaagaaaaaatagagaattctacatactaaatctctctccttttttaattttaatatttgttatcatttatttattggtgctactgtttatccgtaataattgtggggaaaagatattaacatcacgtctttgtctctagtgcagtttttcgagatattccgtagtacatatttatttttaaacaacgacaaagaaatacagatatatcttaaaaaaaaaaaagcattttgtattaaagaatttaattctgatctcaaaaaaaaaaaaaaaaaa

SEQ ID NO: 37 - DNA, 3392 bp, Homo sapiens; identical to SEQ ID NO: 36

SEQ ID NO: 38 - DNA, 3494 bp, Homo sapiens
tcgcggaggcttggggcagccgggtagctcggaggtcgtggcgctgggggctagcaccagcgctctgtcgggaggcgcagcggttaggtggaccggtcagcggactcaccggccagggcgctcggtgctggaatttgatattcattgatccgggttttatccctcttcttttttcttaaacatttttttttaaaactgtattgtttctcgttttaatttatttttgcttgccattccccacttgaatcgggccgacggcttggggagattgctctacttccccaaatcactgtggattttggaaaccagcagaaagaggaaagaggtagcaagagctccagagagaagtcgaggaagagagagacggggtcagagagagcgcgcgggcgtgcgagcagcgaaagcgacaggggcaaagtgagtgacctgcttttgggggtgaccgccggagcgcggcgtgagccctcccccttgggatcccgcagctgaccagtcgcgctgacggacagacagacagacaccgcccccagccccagctaccacctcctccccggccggcggcggacagtggacgcggcggcgagccgcgggcaggggccggagcccgcgcccggaggcggggtggagggggtcggggctcgcggcgtcgcactgaaacttttcgtccaacttctgggctgttctcgcttcggaggagccgtggtccgcgcgggggaagccgagccgagcggagccgcgagaagtgctagctcgggccgggaggagccgcagccggaggagggggaggaggaagaagagaaggaagaggagagggggccgcagtggcgactcggcgctcggaagccgggctcatggacgggtgaggcggcggtgtgcgcagacagtgctccagccgcgcgcgctccccaggccctggcccgggcctcgggccggggaggaagagtagctcgccgaggcgccgaggagagcgggccgccccacagcccgagccggagagggagcgcgagccgcgccggccccggtcgggcctccgaaaccatgaactttctgctgtcttgggtgcattggagccttgccttgctgctctacctccaccatgccaagtggtcccaggctgcacccatggcagaaggaggagggcagaatcatcacgaagtggtgaagttcatggatgtctatcagcgcagctactgccatccaatcgagaccctggtggacatcttccaggagtaccctgatgagatcgagtacatcttcaagccatcctgtgtgcccctgatgcgatgcgggggctgctgcaatgacgagggcctggagtgtgtgcccactgaggagtccaacatcaccatgcagattatgcggatcaaacctcaccaaggccagcacataggagagatgagcttcctacagcacaacaaatgtgaatgcagaccaaagaaagatagagcaagacaagaaaaaaaatcagttcgaggaaagggaaaggggcaaaaacgaaagcgcaagaaatcccggtataagtcctggagcgtatgtgacaagccgaggcggtgagccgggcaggaggaaggagcctccctcagggtttcgggaaccagatctctcaccaggaaagactgatacagaacgatcgatacagaaaccacgctgccgccaccacaccatcaccatcgacagaacagtccttaatccagaaacctgaaatgaaggaagaggagactctgcgcagagcactttgggtccggagggcgagactccggcggaagcattcccgggcgggtgacccagcacggtccctcttggaattggattcgccattttatttttcttgctgctaaatcaccgagcccggaagattagagagttttatttctgggattcctgtagacacacccacccacatacatacatttatatatatatatattatatatatataaaaataaatatctctattttatatatataaaatatatatattctttttttaaattaacagtgctaatgttattggtgtcttcactggatgtatttgactgctgtggacttgagttgggaggggaatgttcccactcagatcctgacagggaagaggaggagatgagagactctggcatgatcttttttttgtcccacttggtggggccagggtcctctcccctgcccaggaatgtgcaaggccagggcatgggggcaaatatgacccagttttgggaacaccgacaaacccagccctggcgctgagcctctctaccccaggtcagacggacagaaagacagatcacaggtacagggatgaggacaccggctctgaccaggagtttggggagcttcaggacattgctgtgctttggggattccctccacatgctgcacgcgcatctcgcccccaggggcactgcctggaagattcaggagcctgggcggccttcgcttactctcacctgcttctgagttgcccaggagaccactggcagatgtcccggcgaagagaagagacacattgttggaagaagcagcccatgacagctccccttcctgggactcgccctcatcctcttcctgctccccttcctggggtgcagcctaaaaggacctatgtcctcacaccattgaaaccactagttctgtccccccaggagacctggttgtgtgtgtgtgagtggttgaccttcctccatcccctggtccttcccttcccttcccgaggcacagagagacagggcaggatccacgtgcccattgtggaggcagagaaaagagaaagtgttttatatacggtacttatttaatatccctttttaattagaaattaaaacagttaatttaattaaagagtagggttttttttcagtattcttggttaatatttaatttcaactatttatgagatgtatcttttgctctctcttgctctcttatttgtaccggtttttgtatataaaattcatgtttccaatctctctctccctgatcggtgacagtcactagcttatcttgaacagatatttaattttgctaacactcagctctgccctccccgatcccctggctccccagcacacattcctttgaaataaggtttcaatatacatctacatactatatatatatttggcaacttgtatttgtgtgtatatatatatatatatgtttatgtatatatgtgattctgataaaatagacattgctattctgttttttatatgtaaaaacaaaacaagaaaaaatagagaattctacatactaaatctctctccttttttaattttaatatttgttatcatttatttattggtgctactgtttatccgtaataattgtggggaaaagatattaacatcacgtctttgtctctagtgcagtttttcgagatattccgtagtacatatttatttttaaacaacgacaaagaaatacagatatatcttaaaaaaaaaaaagcattttgtattaaagaatttaattctgatctcaaaaaaaaaaaaaaaaaa

SEQ ID NO: 39 - DNA, 3494 bp, Homo sapiens; identical to SEQ ID NO: 38

SEQ ID NO: 40 - DNA, 3494 bp, Homo sapiens; identical to SEQ ID NO: 38

SEQ ID NO: 41 - DNA, 1721 bp, Homo sapiens
gccgtccccgccgccgctgcccgccgccaccggccgcccgcccgcccggctcctccggccgcctccgctgcgctgcgctgcgctgcctgcacccagggctcgggagggggccgcggaggagtcgccccccgcgcccggcccccgcccgccgcgcccgggcccgcgccatggggctctggctgtcgccgccccccgcgccgccgggctagggcgatgcgggcgcccccggcgggcggccccggcgggcaccatgagccctctgctccgccgcctgctgctcgccgcactcctgcagctggcccccgcccaggcccctgtctcccagcctgatgcccctggccaccagaggaaagtggtgtcatggatagatgtgtatactcgcgctacctgccagccccgggaggtggtggtgcccttgactgtggagctcatgggcaccgtggccaaacagctggtgcccagctgcgtgactgtgcagcgctgtggtggctgctgccctgacgatggcctggagtgtgtgcccactgggcagcaccaagtccggatgcagatcctcatgatccggtacccgagcagtcagctgggggagatgtccctggaagaacacagccagtgtgaatgcagacctaaaaaaaaggacagtgctgtgaagccagacagccccaggcccctctgcccacgctgcacccagcaccaccagcgccctgacccccggacctgccgctgccgctgccgacgccgcagcttcctccgttgccaagggcggggcttagagctcaacccagacacctgcaggtgccggaagctgcgaaggtgacacatggcttttcagactcagcagggtgacttgcctcagaggctatatcccagtgggggaacaaagaggagcctggtaaaaaacagccaagcccccaagacctcagcccaggcagaagctgctctaggacctgggcctctcagagggctcttctgccatcccttgtctccctgaggccatcatcaaacaggacagagttggaagaggagactgggaggcagcaagaggggtcacataccagctcaggggagaatggagtactgtctcagtttctaaccactctgtgcaagtaagcatcttacaactggctcttcctcccctcactaagaagacccaaacctctgcataatgggatttgggctttggtacaagaactgtgacccccaaccctgataaaagagatggaaggagctgtccctgcctgtgtcactgtttgtcactgtccaggctggctggtttgggcatgaatgtctgcatcactaaatccagagcttgtcttgctccctcattgtgcagatggaggaaatgaggactaaggccccacagcagatcccaggcagggccagaattatgtattcatcactttcaagttattgccacgcatgggagtcagggatagcccagtcaatacagactgcctgccctcctgctcttcaccagggttcttttctagaaggagacagccttctgtggccagagagcttggggtaggacccagatctactgagtgaccttgcttgtcactacccctgcctctctgagcagcagtttccacatgtgcacatagagggaacagaagattgctgtggttggcgtcctcgggccccagagaagtttgagactatctttacgtaatagaaaagaacacttgttcttcctgccaggcaaaaaaaaaaaaaaaaaa

SEQ ID NO: 42 - DNA, 2076 bp, Homo sapiens
cggggaaggggagggaggagggggacgagggctctggcgggtttggaggggctgaacatcgcggggtgttctggtgtcccccgccccgcctctccaaaaagctacaccgacgcggaccgcggcggcgtcctccctcgccctcgcttcacctcgcgggctccgaatgcggggagctcggatgtccggtttcctgtgaggcttttacctgacacccgccgcctttccccggcactggctgggagggcgccctgcaaagttgggaacgcggagccccggacccgctcccgccgcctccggctcgcccagggggggtcgccgggaggagcccgggggagagggaccaggaggggcccgcggcctcgcaggggcgcccgcgcccccacccctgcccccgccagcggaccggtcccccacccccggtccttccaccatgcacttgctgggcttcttctctgtggcgtgttctctgctcgccgctgcgctgctcccgggtcctcgcgaggcgcccgccgccgccgccgccttcgagtccggactcgacctctcggacgcggagcccgacgcgggcgaggccacggcttatgcaagcaaagatctggaggagcagttacggtctgtgtccagtgtagatgaactcatgactgtactctacccagaatattggaaaatgtacaagtgtcagctaaggaaaggaggctggcaacataacagagaacaggccaacctcaactcaaggacagaagagactataaaatttgctgcagcacattataatacagagatcttgaaaagtattgataatgagtggagaaagactcaatgcatgccacgggaggtgtgtatagatgtggggaaggagtttggagtcgcgacaaacaccttctttaaacctccatgtgtgtccgtctacagatgtgggggttgctgcaatagtgaggggctgcagtgcatgaacaccagcacgagctacctcagcaagacgttatttgaaattacagtgcctctctctcaaggccccaaaccagtaacaatcagttttgccaatcacacttcctgccgatgcatgtctaaactggatgtttacagacaagttcattccattattagacgttccctgccagcaacactaccacagtgtcaggcagcgaacaagacctgccccaccaattacatgtggaataatcacatctgcagatgcctggctcaggaagattttatgttttcctcggatgctggagatgactcaacagatggattccatgacatctgtggaccaaacaaggagctggatgaagagacctgtcagtgtgtctgcagagcggggcttcggcctgccagctgtggaccccacaaagaactagacagaaactcatgccagtgtgtctgtaaaaacaaactcttccccagccaatgtggggccaaccgagaatttgatgaaaacacatgccagtgtgtatgtaaaagaacctgccccagaaatcaacccctaaatcctggaaaatgtgcctgtgaatgtacagaaagtccacagaaatgcttgttaaaaggaaagaagttccaccaccaaacatgcagctgttacagacggccatgtacgaaccgccagaaggcttgtgagccaggattttcatatagtgaagaagtgtgtcgttgtgtcccttcatattggaaaagaccacaaatgagctaagattgtactgttttccagttcatcgattttctattatggaaaactgtgttgccacagtagaactgtctgtgaacagagagacccttgtgggtccatgctaacaaagacaaaagtctgtctttcctgaaccatgtggataactttacagaaatggactggagctcatctgcaaaaggcctcttgtaaagactggttttctgccaatgaccaaacagccaagattttcctcttgtgatttctttaaaagaatgactatataatttatttccactaaaaatattgtttctgcattcatttttatagcaacaacaattggtaaaactcactgtgatcaatatttttatatcatgcaaaatatgtttaaaataaaatgaaaattgtattat

SEQ ID NO: 43 - DNA, 1822 bp, Homo sapiens
gccgtccccgccgccgctgcccgccgccaccggccgcccgcccgcccggctcctccggccgcctccgctgcgctgcgctgcgctgcctgcacccagggctcgggagggggccgcggaggagtcgccccccgcgcccggcccccgcccgccgcgcccgggcccgcgccatggggctctggctgtcgccgccccccgcgccgccgggctagggcgatgcgggcgcccccggcgggcggccccggcgggcaccatgagccctctgctccgccgcctgctgctcgccgcactcctgcagctggcccccgcccaggcccctgtctcccagcctgatgcccctggccaccagaggaaagtggtgtcatggatagatgtgtatactcgcgctacctgccagccccgggaggtggtggtgcccttgactgtggagctcatgggcaccgtggccaaacagctggtgcccagctgcgtgactgtgcagcgctgtggtggctgctgccctgacgatggcctggagtgtgtgcccactgggcagcaccaagtccggatgcagatcctcatgatccggtacccgagcagtcagctgggggagatgtccctggaagaacacagccagtgtgaatgcagacctaaaaaaaaggacagtgctgtgaagccagacagggctgccactccccaccaccgtccccagccccgttctgttccgggctgggactctgcccccggagcaccctccccagctgacatcacccatcccactccagccccaggcccctctgcccacgctgcacccagcaccaccagcgccctgacccccggacctgccgctgccgctgccgacgccgcagcttcctccgttgccaagggcggggcttagagctcaacccagacacctgcaggtgccggaagctgcgaaggtgacacatggcttttcagactcagcagggtgacttgcctcagaggctatatcccagtgggggaacaaagaggagcctggtaaaaaacagccaagcccccaagacctcagcccaggcagaagctgctctaggacctgggcctctcagagggctcttctgccatcccttgtctccctgaggccatcatcaaacaggacagagttggaagaggagactgggaggcagcaagaggggtcacataccagctcaggggagaatggagtactgtctcagtttctaaccactctgtgcaagtaagcatcttacaactggctcttcctcccctcactaagaagacccaaacctctgcataatgggatttgggctttggtacaagaactgtgacccccaaccctgataaaagagatggaaggagctgtccctgcctgtgtcactgtttgtcactgtccaggctggctggtttgggcatgaatgtctgcatcactaaatccagagcttgtcttgctccctcattgtgcagatggaggaaatgaggactaaggccccacagcagatcccaggcagggccagaattatgtattcatcactttcaagttattgccacgcatgggagtcagggatagcccagtcaatacagactgcctgccctcctgctcttcaccagggttcttttctagaaggagacagccttctgtggccagagagcttggggtaggacccagatctactgagtgaccttgcttgtcactacccctgcctctctgagcagcagtttccacatgtgcacatagagggaacagaagattgctgtggttggcgtcctcgggccccagagaagtttgagactatctttacgtaatagaaaagaacacttgttcttcctgccaggcaaaaaaaaaaaaaaaaaa

SEQ ID NO: 44 - DNA, 3220 bp, Homo sapiens
aaacttttttccctggctctgccctgggtttccccttgaagggatttccctccgcctctgcaacaagaccctttataaagcacagactttctatttcactccgcggtatctgcatcgggcctcactggcttcaggagctgaataccctcccaggcacacacaggtgggacacaaataagggttttggaaccactattttctcatcacgacagcaacttaaaatgcctgggaagatggtcgtgatccttggagcctcaaatatactttggataatgtttgcagcttctcaagcttttaaaatcgagaccaccccagaatctagatatcttgctcagattggtgactccgtctcattgacttgcagcaccacaggctgtgagtccccatttttctcttggagaacccagatagatagtccactgaatgggaaggtgacgaatgaggggaccacatctacgctgacaatgaatcctgttagttttgggaacgaacactcttacctgtgcacagcaacttgtgaatctaggaaattggaaaaaggaatccaggtggagatctactcttttcctaaggatccagagattcatttgagtggccctctggaggctgggaagccgatcacagtcaagtgttcagttgctgatgtatacccatttgacaggctggagatagacttactgaaaggagatcatctcatgaagagtcaggaatttctggaggatgcagacaggaagtccctggaaaccaagagtttggaagtaacctttactcctgtcattgaggatattggaaaagttcttgtttgccgagctaaattacacattgatgaaatggattctgtgcccacagtaaggcaggctgtaaaagaattgcaagtctacatatcacccaagaatacagttatttctgtgaatccatccacaaagctgcaagaaggtggctctgtgaccatgacctgttccagcgagggtctaccagctccagagattttctggagtaagaaattagataatgggaatctacagcacctttctggaaatgcaactctcaccttaattgctatgaggatggaagattctggaatttatgtgtgtgaaggagttaatttgattgggaaaaacagaaaagaggtggaattaattgttcaagagaaaccatttactgttgagatctcccctggaccccggattgctgctcagattggagactcagtcatgttgacatgtagtgtcatgggctgtgaatccccatctttctcctggagaacccagatagacagccctctgagcgggaaggtgaggagtgaggggaccaattccacgctgaccctgagccctgtgagttttgagaacgaacactcttatctgtgcacagtgacttgtggacataagaaactggaaaagggaatccaggtggagctctactcattccctagagatccagaaatcgagatgagtggtggcctcgtgaatgggagctctgtcactgtaagctgcaaggttcctagcgtgtacccccttgaccggctggagattgaattacttaagggggagactattctggagaatatagagtttttggaggatacggatatgaaatctctagagaacaaaagtttggaaatgaccttcatccctaccattgaagatactggaaaagctcttgtttgtcaggctaagttacatattgatgacatggaattcgaacccaaacaaaggcagagtacgcaaacactttatgtcaatgttgcccccagagatacaaccgtcttggtcagcccttcctccatcctggaggaaggcagttctgtgaatatgacatgcttgagccagggctttcctgctccgaaaatcctgtggagcaggcagctccctaacggggagctacagcctctttctgagaatgcaactctcaccttaatttctacaaaaatggaagattctggggtttatttatgtgaaggaattaaccaggctggaagaagcagaaaggaagtggaattaattatccaagttactccaaaagacataaaacttacagcttttccttctgagagtgtcaaagaaggagacactgtcatcatctcttgtacatgtggaaatgttccagaaacatggataatcctgaagaaaaaagcggagacaggagacacagtactaaaatctatagatggcgcctataccatccgaaaggcccagttgaaggatgcgggagtatatgaatgtgaatctaaaaacaaagttggctcacaattaagaagtttaacacttgatgttcaaggaagagaaaacaacaaagactatttttctcctgagcttctcgtgctctattttgcatcctccttaataatacctgccattggaatgataatttactttgcaagaaaagccaacatgaaggggtcatatagtcttgtagaagcacagaagtcaaaagtgtagctaatgcttgatatgttcaactggagacactatttatctgtgcaaatccttgatactgctcatcattccttgagaaaaacaatgagctgagaggcagacttccctgaatgtattgaacttggaaagaaatgcccatctatgtcccttgctgtgagcaagaagtcaaagtaaaacttgctgcctgaagaacagtaactgccatcaagatgagagaactggaggagttccttgatctgtatatacaataacataatttgtacatatgtaaaataaaattatgccatagcaagattgcttaaaatagcaacactctatatttagattgttaaaataactagtgttgcttggactattataatttaatgcatgttaggaaaatttcacattaatatttgctgacagctgacctttgtcatctttcttctattttattccctttcacaaaattttattcctatatagtttattgacaataatttcaggttttgtaaagatgccgggttttatatttttatagacaaataataagcaaagggagcactgggttgactttcaggtactaaatacctcaacctatggtataatggttgactgggtttctctgtatagtactggcatggtacggagatgtttcacgaagtttgttcatcagactcctgtgcaactttcccaatgtggcctaaaaatgcaacttctttttattttcttttgtaaatgtttaggtttttttgtatagtaaagtgataatttctggaattagaaaaaaaaaaaaaaaaaaa

SEQ ID NO: 45 - DNA, 2944 bp, Homo sapiens
aaacttttttccctggctctgccctgggtttccccttgaagggatttccctccgcctctgcaacaagaccctttataaagcacagactttctatttcactccgcggtatctgcatcgggcctcactggcttcaggagctgaataccctcccaggcacacacaggtgggacacaaataagggttttggaaccactattttctcatcacgacagcaacttaaaatgcctgggaagatggtcgtgatccttggagcctcaaatatactttggataatgtttgcagcttctcaagcttttaaaatcgagaccaccccagaatctagatatcttgctcagattggtgactccgtctcattgacttgcagcaccacaggctgtgagtccccatttttctcttggagaacccagatagatagtccactgaatgggaaggtgacgaatgaggggaccacatctacgctgacaatgaatcctgttagttttgggaacgaacactcttacctgtgcacagcaacttgtgaatctaggaaattggaaaaaggaatccaggtggagatctactcttttcctaaggatccagagattcatttgagtggccctctggaggctgggaagccgatcacagtcaagtgttcagttgctgatgtatacccatttgacaggctggagatagacttactgaaaggagatcatctcatgaagagtcaggaatttctggaggatgcagacaggaagtccctggaaaccaagagtttggaagtaacctttactcctgtcattgaggatattggaaaagttcttgtttgccgagctaaattacacattgatgaaatggattctgtgcccacagtaaggcaggctgtaaaagaattgcaagtctacatatcacccaagaatacagttatttctgtgaatccatccacaaagctgcaagaaggtggctctgtgaccatgacctgttccagcgagggtctaccagctccagagattttctggagtaagaaattagataatgggaatctacagcacctttctggaaatgcaactctcaccttaattgctatgaggatggaagattctggaatttatgtgtgtgaaggagttaatttgattgggaaaaacagaaaagaggtggaattaattgttcaagcattccctagagatccagaaatcgagatgagtggtggcctcgtgaatgggagctctgtcactgtaagctgcaaggttcctagcgtgtacccccttgaccggctggagattgaattacttaagggggagactattctggagaatatagagtttttggaggatacggatatgaaatctctagagaacaaaagtttggaaatgaccttcatccctaccattgaagatactggaaaagctcttgtttgtcaggctaagttacatattgatgacatggaattcgaacccaaacaaaggcagagtacgcaaacactttatgtcaatgttgcccccagagatacaaccgtcttggtcagcccttcctccatcctggaggaaggcagttctgtgaatatgacatgcttgagccagggctttcctgctccgaaaatcctgtggagcaggcagctccctaacggggagctacagcctctttctgagaatgcaactctcaccttaatttctacaaaaatggaagattctggggtttatttatgtgaaggaattaaccaggctggaagaagcagaaaggaagtggaattaattatccaagttactccaaaagacataaaacttacagcttttccttctgagagtgtcaaagaaggagacactgtcatcatctcttgtacatgtggaaatgttccagaaacatggataatcctgaagaaaaaagcggagacaggagacacagtactaaaatctatagatggcgcctataccatccgaaaggcccagttgaaggatgcgggagtatatgaatgtgaatctaaaaacaaagttggctcacaattaagaagtttaacacttgatgttcaaggaagagaaaacaacaaagactatttttctcctgagcttctcgtgctctattttgcatcctccttaataatacctgccattggaatgataatttactttgcaagaaaagccaacatgaaggggtcatatagtcttgtagaagcacagaagtcaaaagtgtagctaatgcttgatatgttcaactggagacactatttatctgtgcaaatccttgatactgctcatcattccttgagaaaaacaatgagctgagaggcagacttccctgaatgtattgaacttggaaagaaatgcccatctatgtcccttgctgtgagcaagaagtcaaagtaaaacttgctgcctgaagaacagtaactgccatcaagatgagagaactggaggagttccttgatctgtatatacaataacataatttgtacatatgtaaaataaaattatgccatagcaagattgcttaaaatagcaacactctatatttagattgttaaaataactagtgttgcttggactattataatttaatgcatgttaggaaaatttcacattaatatttgctgacagctgacctttgtcatctttcttctattttattccctttcacaaaattttattcctatatagtttattgacaataatttcaggttttgtaaagatgccgggttttatatttttatagacaaataataagcaaagggagcactgggttgactttcaggtactaaatacctcaacctatggtataatggttgactgggtttctctgtatagtactggcatggtacggagatgtttcacgaagtttgttcatcagactcctgtgcaactttcccaatgtggcctaaaaatgcaacttctttttattttcttttgtaaatgtttaggtttttttgtatagtaaagtgataatttctggaattagaaaaaaaaaaaaaaaaaaa

SEQ ID NO: 46 - DNA, 3034 bp, Homo sapiens
aaacttttttccctggctctgccctgggtttccccttgaagggatttccctccgcctctgcaacaagaccctttataaagcacagactttctatttcactccgcggtatctgcatcgggcctcactggcttcaggagctgaataccctcccaggcacacacaggtgggacacaaataagggttttggaaccactattttctcatcacgacagcaacttaaaatgcctgggaagatggtcgtgatccttggagcctcaaatatactttggataatgtttgcagcttctcaagcttttaaaatcgagaccaccccagaatctagatatcttgctcagattggtgactccgtctcattgacttgcagcaccacaggctcttttcctaaggatccagagattcatttgagtggccctctggaggctgggaagccgatcacagtcaagtgttcagttgctgatgtatacccatttgacaggctggagatagacttactgaaaggagatcatctcatgaagagtcaggaatttctggaggatgcagacaggaagtccctggaaaccaagagtttggaagtaacctttactcctgtcattgaggatattggaaaagttcttgtttgccgagctaaattacacattgatgaaatggattctgtgcccacagtaaggcaggctgtaaaagaattgcaagtctacatatcacccaagaatacagttatttctgtgaatccatccacaaagctgcaagaaggtggctctgtgaccatgacctgttccagcgagggtctaccagctccagagattttctggagtaagaaattagataatgggaatctacagcacctttctggaaatgcaactctcaccttaattgctatgaggatggaagattctggaatttatgtgtgtgaaggagttaatttgattgggaaaaacagaaaagaggtggaattaattgttcaagagaaaccatttactgttgagatctcccctggaccccggattgctgctcagattggagactcagtcatgttgacatgtagtgtcatgggctgtgaatccccatctttctcctggagaacccagatagacagccctctgagcgggaaggtgaggagtgaggggaccaattccacgctgaccctgagccctgtgagttttgagaacgaacactcttatctgtgcacagtgacttgtggacataagaaactggaaaagggaatccaggtggagctctactcattccctagagatccagaaatcgagatgagtggtggcctcgtgaatgggagctctgtcactgtaagctgcaaggttcctagcgtgtacccccttgaccggctggagattgaattacttaagggggagactattctggagaatatagagtttttggaggatacggatatgaaatctctagagaacaaaagtttggaaatgaccttcatccctaccattgaagatactggaaaagctcttgtttgtcaggctaagttacatattgatgacatggaattcgaacccaaacaaaggcagagtacgcaaacactttatgtcaatgttgcccccagagatacaaccgtcttggtcagcccttcctccatcctggaggaaggcagttctgtgaatatgacatgcttgagccagggctttcctgctccgaaaatcctgtggagcaggcagctccctaacggggagctacagcctctttctgagaatgcaactctcaccttaatttctacaaaaatggaagattctggggtttatttatgtgaaggaattaaccaggctggaagaagcagaaaggaagtggaattaattatccaagttactccaaaagacataaaacttacagcttttccttctgagagtgtcaaagaaggagacactgtcatcatctcttgtacatgtggaaatgttccagaaacatggataatcctgaagaaaaaagcggagacaggagacacagtactaaaatctatagatggcgcctataccatccgaaaggcccagttgaaggatgcgggagtatatgaatgtgaatctaaaaacaaagttggctcacaattaagaagtttaacacttgatgttcaaggaagagaaaacaacaaagactatttttctcctgagcttctcgtgctctattttgcatcctccttaataatacctgccattggaatgataatttactttgcaagaaaagccaacatgaaggggtcatatagtcttgtagaagcacagaagtcaaaagtgtagctaatgcttgatatgttcaactggagacactatttatctgtgcaaatccttgatactgctcatcattccttgagaaaaacaatgagctgagaggcagacttccctgaatgtattgaacttggaaagaaatgcccatctatgtcccttgctgtgagcaagaagtcaaagtaaaacttgctgcctgaagaacagtaactgccatcaagatgagagaactggaggagttccttgatctgtatatacaataacataatttgtacatatgtaaaataaaattatgccatagcaagattgcttaaaatagcaacactctatatttagattgttaaaataactagtgttgcttggactattataatttaatgcatgttaggaaaatttcacattaatatttgctgacagctgacctttgtcatctttcttctattttattccctttcacaaaattttattcctatatagtttattgacaataatttcaggttttgtaaagatgccgggttttatatttttatagacaaataataagcaaagggagcactgggttgactttcaggtactaaatacctcaacctatggtataatggttgactgggtttctctgtatagtactggcatggtacggagatgtttcacgaagtttgttcatcagactcctgtgcaactttcccaatgtggcctaaaaatgcaacttctttttattttcttttgtaaatgtttaggtttttttgtatagtaaagtgataatttctggaattagaaaaaaaaaaaaaaaaaaa

SEQ ID NO: 47 - DNA, 1280 bp, Homo sapiens
cctataacttggaatgtgggtggaggggttcatagttctccctgagtgagacttgcctgcttctctggcccctggtcctgtcctgttctccagcatggtgtgtctgaagctccctggaggctcctgcatgacagcgctgacagtgacactgatggtgctgagctccccactggctttgtctggggacacccgaccacgtttcctgtggcagcctaagagggagtgtcatttcttcaatgggacggagcgggtgcggttcctggacagatacttctataaccaggaggagtccgtgcgcttcgacagcgacgtgggggagttccgggcggtgacggagctggggcggcctgacgctgagtactggaacagccagaaggacatcctggagcaggcgcgggccgcggtggacacctactgcagacacaactacggggttgtggagagcttcacagtgcagcggcgagtccaacctaaggtgactgtatatccttcaaagacccagcccctgcagcaccacaacctcctggtctgctctgtgagtggtttctatccaggcagcattgaagtcaggtggttcctgaacggccaggaagagaaggctgggatggtgtccacaggcctgatccagaatggagactggaccttccagaccctggtgatgctggaaacagttcctcgaagtggagaggtttacacctgccaagtggagcacccaagcgtgacaagccctctcacagtggaatggagagcacggtctgaatctgcacagagcaagatgctgagtggagtcgggggctttgtgctgggcctgctcttccttggggccgggctgttcatctacttcaggaatcagaaaggacactctggacttcagccaacaggattcctgagctgaaatgcagatgaccacattcaaggaagaactttctgccccggctttgcaggatgaaaagctttcctgcttggcagttattcttccacaagagagggctttctcaggacctggttgctactggttcggcaactgcagaaaatgtcctcccttgtggcttcctcagctcctgcccttggcctgaagtcccagcattgatggcagcgcctcatcttcaacttttgtgctcccctttgcctaaaccgtatggcctcccgtgcatctgtattcaccctgtatgacaaacacattacattattaaatgtttctcaaagatggagttaaaaaaaaaaaaaaaaaaaaaaaaaaaaaaaaaaaaaaaaaaaaaaaaaaaaaaaaaaaaaaaaaa

SEQ ID NO: 48 - DNA, 1586 bp, Homo sapiens
tccgcagtcccggttctaaagtccccagtcacccacccggactcacattctccccagaggccgagatgcgggtcatggcgccccgagccctcctcctgctgctctcgggaggcctggccctgaccgagacctgggcctgctcccactccatgaggtatttcgacaccgccgtgtcccggcccggccgcggagagccccgcttcatctcagtgggctacgtggacgacacgcagttcgtgcggttcgacagcgacgccgcgagtccgagaggggagccgcgggcgccgtgggtggagcaggaggggccggagtattgggaccgggagacacagaagtacaagcgccaggcacaggctgaccgagtgagcctgcggaacctgcgcggctactacaaccagagcgaggacgggtctcacaccctccagaggatgtctggctgcgacctggggcccgacgggcgcctcctccgcgggtatgaccagtccgcctacgacggcaaggattacatcgccctgaacgaggacctgcgctcctggaccgccgcggacaccgcggctcagatcacccagcgcaagttggaggcggcccgtgcggcggagcagctgagagcctacctggagggcacgtgcgtggagtggctccgcagatacctggagaacgggaaggagacgctgcagcgcgcagaacccccaaagacacacgtgacccaccaccccctctctgaccatgaggccaccctgaggtgctgggccctgggcttctaccctgcggagatcacactgacctggcagcgggatggggaggaccagacccaggacaccgagcttgtggagaccaggccagcaggagatggaaccttccagaagtgggcagctgtggtggtgccttctggacaagagcagagatacacgtgccatatgcagcacgaggggctgcaagagcccctcaccctgagctgggagccatcttcccagcccaccatccccatcatgggcatcgttgctggcctggctgtcctggttgtcctagctgtccttggagctgtggtcaccgctatgatgtgtaggaggaagagctcaggtggaaaaggagggagctgctctcaggctgcgtgcagcaacagtgcccagggctctgatgagtctctcatcacttgtaaagcctgagacagctgcctgtgtgggactgagatgcaggatttcttcacacctctcctttgtgacttcaagagcctctggcatctctttctgcaaaggcacctgaatgtgtctgcgttcctgttagcataatgtgaggaggtggagagacagcccacccccgtgtccaccgtgacccctgtccccacactgacctgtgttccctccccgatcatctttcctgttccagagaggtggggctggatgtctccatctctgtctcaaattcatggtgcactgagctgcaacttcttacttccctaatgaagttaagaacctgaatataaatttgtgttctcaaatatttgctatgaagcgttgatggattaattaaataagtcaattcctagaagttgagagagcaaataaagacctgagaaccttccagaa

SEQ ID NO: 49 - DNA, 1636 bp, Homo sapiens
gagaagccaatcagtgtcgtcgcggtcgctgttctaaagcccgcacgcacccaccgggactcagattctccccagacgccgaggatggccgtcatggcgccccgaaccctcctcctgctactctcgggggccctggccctgacccagacctgggcgggctcccactccatgaggtatttcttcacatccgtgtcccggcccggccgcggggagccccgcttcatcgccgtgggctacgtggacgacacgcagttcgtgcggttcgacagcgacgccgcgagccagaggatggagccgcgggcgccgtggatagagcaggaggggccggagtattgggaccaggagacacggaatgtgaaggcccagtcacagactgaccgagtggacctggggaccctgcgcggctactacaaccagagcgaggccggttctcacaccatccagataatgtatggctgcgacgtggggtcggacgggcgcttcctccgcgggtaccggcaggacgcctacgacggcaaggattacatcgccctgaacgaggacctgcgctcttggaccgcggcggacatggcggctcagatcaccaagcgcaagtgggaggcggcccatgaggcggagcagttgagagcctacctggatggcacgtgcgtggagtggctccgcagatacctggagaacgggaaggagacgctgcagcgcacggacccccccaagacacatatgacccaccaccccatctctgaccatgaggccaccctgaggtgctgggccctgggcttctaccctgcggagatcacactgacctggcagcgggatggggaggaccagacccaggacacggagctcgtggagaccaggcctgcaggggatggaaccttccagaagtgggcggctgtggtggtgccttctggagaggagcagagatacacctgccatgtgcagcatgagggtctgcccaagcccctcaccctgagatgggagctgtcttcccagcccaccatccccatcgtgggcatcattgctggcctggttctccttggagctgtgatcactggagctgtggtcgctgccgtgatgtggaggaggaagagctcagatagaaaaggagggagttacactcaggctgcaagcagtgacagtgcccagggctctgatgtgtccctcacagcttgtaaagtgtgagacagctgccttgtgtgggactgagaggcaagagttgttcctgcccttccctttgtgacttgaagaaccctgactttgtttctgcaaaggcacctgcatgtgtctgtgttcgtgtaggcataatgtgaggaggtggggagaccaccccacccccatgtccaccatgaccctcttcccacgctgacctgtgctccctccccaatcatctttcctgttccagagaggtggggctgaggtgtctccatctctgtctcaacttcatggtgcactgagctgtaacttcttccttccctattaaaattagaaccttagtataaatttactttctcaaattcttgccatgagaggttgatgagttaattaaaggagaagattcctaaaatttgagagacaaaataaatggaagacatgagaaccttccagagtccaaaaaaaaaaaaaaaaaaaaaaaaaa

SEQ ID NO: 50 - DNA, 1578 bp, Homo sapiens
agttctaaagtccccacgcacccacccggactcagagtctcctcagacgccgagatgctggtcatggcgccccgaaccgtcctcctgctgctctcggcggccctggccctgaccgagacctgggccggctcccactccatgaggtatttctacacctccgtgtcccggcccggccgcggggagccccgcttcatctcagtgggctacgtggacgacacccagttcgtgaggttcgacagcgacgccgcgagtccgagagaggagccgcgggcgccgtggatagagcaggaggggccggagtattgggaccggaacacacagatctacaaggcccaggcacagactgaccgagagagcctgcggaacctgcgcggctactacaaccagagcgaggccgggtctcacaccctccagagcatgtacggctgcgacgtggggccggacgggcgcctcctccgcgggcatgaccagtacgcctacgacggcaaggattacatcgccctgaacgaggacctgcgctcctggaccgccgcggacacggcggctcagatcacccagcgcaagtgggaggcggcccgtgaggcggagcagcggagagcctacctggagggcgagtgcgtggagtggctccgcagatacctggagaacgggaaggacaagctggagcgcgctgaccccccaaagacacacgtgacccaccaccccatctctgaccatgaggccaccctgaggtgctgggccctgggtttctaccctgcggagatcacactgacctggcagcgggatggcgaggaccaaactcaggacactgagcttgtggagaccagaccagcaggagatagaaccttccagaagtgggcagctgtggtggtgccttctggagaagagcagagatacacatgccatgtacagcatgaggggctgccgaagcccctcaccctgagatgggagccgtcttcccagtccaccgtccccatcgtgggcattgttgctggcctggctgtcctagcagttgtggtcatcggagctgtggtcgctgctgtgatgtgtaggaggaagagttcaggtggaaaaggagggagctactctcaggctgcgtgcagcgacagtgcccagggctctgatgtgtctctcacagcttgaaaagcctgagacagctgtcttgtgagggactgagatgcaggatttcttcacgcctcccctttgtgacttcaagagcctctggcatctctttctgcaaaggcacctgaatgtgtctgcgtccctgttagcataatgtgaggaggtggagagacagcccacccttgtgtccactgtgacccctgttcccatgctgacctgtgtttcctccccagtcatctttcttgttccagagaggtggggctggatgtctccatctctgtctcaactttacgtgcactgagctgcaacttcttacttccctactgaaaataagaatctgaatataaatttgttttctcaaatatttgctatgagaggttgatggattaattaaataagtcaattcctggaatttgagagagcaaataaagacctgagaaccttccagaaaaaaaa

SEQ ID NO: 51 - DNA, 1233 bp, Homo sapiens
cctataacttggaatgtgggtggaggggttcatagttctccctgagtgagacttgcctgctgctctggcccctggtcctgtcctgttctccagcatggtgtgtctgaggctccctggaggctcctgcatggcagttctgacagtgacactgatggtgctgagctccccactggctttggctggggacaccagaccacgtttcttggagtactctacgtctgagtgtcatttcttcaatgggacggagcgggtgcggtacctggacagatacttccataaccaggaggagaacgtgcgcttcgacagcgacgtgggggagttccgggcggtgacggagctggggcggcctgatgccgagtactggaacagccagaaggacctcctggagcagaagcggggccgggtggacaactactgcagacacaactacggggttgtggagagcttcacagtgcagcggcgagtccatcctaaggtgactgtgtatccttcaaagacccagcccctgcagcaccataacctcctggtctgttctgtgagtggtttctatccaggcagcattgaagtcaggtggttccggaatggccaggaagagaagactggggtggtgtccacaggcctgatccacaatggagactggaccttccagaccctggtgatgctggaaacagttcctcggagtggagaggtttacacctgccaagtggagcacccaagcgtgacaagccctctcacagtggaatggagagcacggtctgaatctgcacagagcaagatgctgagtggagtcgggggctttgtgctgggcctgctcttccttggggccgggctgttcatctacttcaggaatcagaaaggacactctggacttcagccaagaggattcctgagctgaagtgcagatgacacattcaaagaagaactttctgccccagctttgcaggatgaaaagctttccctcctggctgttattcttccacaagagagggctttctcaggacctggttgctactggttcagcaactgcagaaaatgtcctcccttgtggcttcctcagctcctgttcttggcctgaagccccacagctttgatggcagtgcctcatcttcaacttttgtgctcccctttgcctaaaccctatggcctcctgtgcatctgtactcaccctgtaccacaaacacattacattattaaatgtttctcaaagatggagttaaaaaaaaaaaaaaaaaa

SEQ ID NO: 52 - DNA, 1586 bp, Homo sapiens
tccgcagtcccggttctaaagtccccagtcacccacccggactcacattctccccagaggccgagatgcgggtcatggcgccccgagccctcctcctgctgctctcgggaggcctggccctgaccgagacctgggcctgctcccactccatgaggtatttcgacaccgccgtgtcccggcccggccgcggagagccccgcttcatctcagtgggctacgtggacgacacgcagttcgtgcggttcgacagcgacgccgcgagtccgagaggggagccgcgggcgccgtgggtggagcaggaggggccggagtattgggaccgggagacacagaactacaagcgccaggcacaggctgaccgagtgagcctgcggaacctgcgcggctactacaaccagagcgaggacgggtctcacaccctccagaggatgtatggctgcgacctggggcccgacgggcgcctcctccgcgggtatgaccagtccgcctacgacggcaaggattacatcgccctgaacgaggacctgcgctcctggaccgccgcggacaccgcggctcagatcacccagcgcaagttggaggcggcccgtgcggcggagcagctgagagcctacctggagggcacgtgcgtggagtggctccgcagatacctggagaacgggaaggagacgctgcagcgcgcagaacccccaaagacacacgtgacccaccaccccctctctgaccatgaggccaccctgaggtgctgggccctgggcttctaccctgcggagatcacactgacctggcagcgggatggggaggaccagacccaggacaccgagcttgtggagaccaggccagcaggagatggaaccttccagaagtgggcagctgtggtggtgccttctggacaagagcagagatacacgtgccatatgcagcacgaggggctgcaagagcccctcaccctgagctgggagccatcttcccagcccaccatccccatcatgggcatcgttgctggcctggctgtcctggttgtcctagctgtccttggagctgtggtcaccgctatgatgtgtaggaggaagagctcaggtggaaaaggagggagctgctctcaggctgcgtgcagcaacagtgcccagggctctgatgagtctctcatcacttgtaaagcctgagacagctgcctgtgtgggactgagatgcaggatttcttcacacctctcctttgtgacttcaagagcctctggcatctctttctgcaaaggcgtctgaatgtgtctgcgttcctgttagcataatgtgaggaggtggagagacagcccacccccgtgtccaccgtgacccctgtccccacactgacctgtgttccctccccgatcatctttcctgttccagagaggtggggctggatgtctccatctctgtctcaaattcatggtgcactgagctgcaacttcttacttccctaatgaagttaagaacctgaatataaatttgtgttctcaaatatttgctatgaagcgttgatggattaattaaataagtcaattcctagaagttgagagagcaaataaagacctgagaaccttccagaa

SEQ ID NO: 53 - DNA, 1611 bp, Homo sapiens
gagaagccaatcagtgtcgtcgcggtcgctgttctaaagtccgcacgcacccaccgggactcagattctccccagacgccgaggatggccgtcatggcgccccgaaccctcctcctgctactctcgggggccctggccctgacccagacctgggcgggctcccactccatgaggtatttcttcacatccgtgtcccggcccggccgcggggagccccgcttcatcgccgtgggctacgtggacgacacgcagttcgtgcggttcgacagcgacgccgcgagccagaagatggagccgcgggcgccgtggatagagcaggaggggccggagtattgggaccaggagacacggaatatgaaggcccactcacagactgaccgagcgaacctggggaccctgcgcggctactacaaccagagcgaggacggttctcacaccatccagataatgtatggctgcgacgtggggccggacgggcgcttcctccgcgggtaccggcaggacgcctacgacggcaaggattacatcgccctgaacgaggacctgcgctcttggaccgcggcggacatggcagctcagatcaccaagcgcaagtgggaggcggtccatgcggcggagcagcggagagtctacctggagggccggtgcgtggacgggctccgcagatacctggagaacgggaaggagacgctgcagcgcacggacccccccaagacacatatgacccaccaccccatctctgaccatgaggccaccctgaggtgctgggccctgggcttctaccctgcggagatcacactgacctggcagcgggatggggaggaccagacccaggacacggagctcgtggagaccaggcctgcaggggatggaaccttccagaagtgggcggctgtggtggtgccttctggagaggagcagagatacacctgccatgtgcagcatgagggtctgcccaagcccctcaccctgagatgggagctgtcttcccagcccaccatccccatcgtgggcatcattgctggcctggttctccttggagctgtgatcactggagctgtggtcgctgccgtgatgtggaggaggaagagctcagatagaaaaggagggagttacactcaggctgcaagcagtgacagtgcccagggctctgatgtgtctctcacagcttgtaaagtgtgagacagctgccttgtgtgggactgagaggcaagagttgttcctgcccttccctttgtgacttgaagaaccctgactttgtttctgcaaaggcacctgcatgtgtctgtgttcgtgtaggcataatgtgaggaggtggggagagcaccccacccccatgtccaccatgaccctcttcccacgctgacctgtgctccctctccaatcatctttcctgttccagagaggtggggctgaggtgtctccatctctgtctcaacttcatggtgcactgagctgtaacttcttccttccctattaaaattagaacctgagtataaatttactttctcaaattcttgccatgagaggttgatgagttaattaaaggagaagattcctaaaatttgagagacaaaattaatggaacgcatgagaaccttccagagtcca

SEQ ID NO: 54 - DNA, 2679 bp, Homo sapiens
gcagactcagttctcattcccaatgggtgtcgggtttctagagaagccaatcagcgtcgccacgactcccgactataaagtccccatccggactcaagaagttctcaggactcagaggctgggatcatggtagatggaaccctccttttactcctctcggaggccctggcccttacccagacctgggcgggctcccactccttgaagtatttccacacttccgtgtcccggcccggccgcggggagccccgcttcatctctgtgggctacgtggacgacacccagttcgtgcgcttcgacaacgacgccgcgagtccgaggatggtgccgcgggcgccgtggatggagcaggaggggtcagagtattgggaccgggagacacggagcgccagggacaccgcacagattttccgagtgaatctgcggacgctgcgcggctactacaatcagagcgaggccgggtctcacaccctgcagtggatgcatggctgcgagctggggcccgacgggcgcttcctccgcgggtatgaacagttcgcctacgacggcaaggattatctcaccctgaatgaggacctgcgctcctggaccgcggtggacacggcggctcagatctccgagcaaaagtcaaatgatgcctctgaggcggagcaccagagagcctacctggaagacacatgcgtggagtggctccacaaatacctggagaaggggaaggagacgctgcttcacctggagcccccaaagacacacgtgactcaccaccccatctctgaccatgaggccaccctgaggtgctgggccctgggcttctaccctgcggagatcacactgacctggcagcaggatggggagggccatacccaggacacggagctcgtggagaccaggcctgcaggggatggaaccttccagaagtgggcagctgtggtggtgccttctggagaggagcagagatacacgtgccatgtgcagcatgaggggctacccgagcccgtcaccctgagatggaagccggcttcccagcccaccatccccatcgtgggcatcattgctggcctggttctccttggatctgtggtctctggagctgtggttgctgctgtgatatggaggaagaagagctcaggtggaaaaggagggagctactctaaggctgagtggagcgacagtgcccaggggtctgagtctcacagcttgtaaagcctgagacagctgccttgtgtgcgactgagatgcacagctgccttgtgtgcgactgagatgcaggatttcctcacgcctcccctatgtgtcttaggggactctggcttctctttttgcaagggcctctgaatctgtctgtgtccctgttagcacaatgtgaggaggtagagaaacagtccacctctgtgtctaccatgacccccttcctcacactgacctgtgttccttccctgttctcttttctattaaaaataagaacctgggcagagtgcggcagctcatgcctgtaatcccagcacttagggaggccgaggagggcagatcacgaggtcaggagatcgaaaccatcctggctaacacggtgaaaccccgtctctactaaaaaatacaaaaaattagctgggcgcagaggcacgggcctgtagtcccagctactcaggaggcggaggcaggagaatggcgtcaacccgggaggcggaggttgcagtgagccaggattgtgcgactgcactccagcctgggtgacagggtgaaacgccatctcaaaaaataaaaattgaaaaataaaaaaagaacctggatctcaatttaatttttcatattcttgcaatgaaatggacttgaggaagctaagatcatagctagaaatacagataattccacagcacatctctagcaaatttagcctattcctattctctagcctattccttaccacctgtaatcttgaccatataccttggagttgaatattgttttcatactgctgtggtttgaatgttccctccaacactcatgttgagacttaatccctaatgtggcaatactgaaaggtggggcctttgagatgtgattggatcgtaaggctgtgccttcattcatgggttaatggattaatgggttatcacaggaatgggactggtggctttataagaagaggaaaagagaactgagctagcatgcccagcccacagagagcctccactagagtgatgctaagtggaaatgtgaggtgcagctgccacagagggcccccaccagggaaatgtctagtgtctagtggatccaggccacaggagagagtgccttgtggagcgctgggagcaggacctgaccaccaccaggaccccagaactgtggagtcagtggcagcatgcagcgcccccttgggaaagctttaggcaccagcctgcaacccattcgagcagccacgtaggctgcacccagcaaagccacaggcacggggctacctgaggccttgggggcccaatccctgctccagtgtgtccgtgaggcagcacacgaagtcaaaagagattattctcttcccacagataccttttctctcccatgaccctttaacagcatctgcttcattcccctcaccttcccaggctgatctgaggtaaactttgaagtaaaataaaagctgtgtttgagcatcatttgtatttcaaaaaaaaaaaaaaaaaa

SEQ ID NO: 55 - DNA, 1171 bp, Homo sapiens
ccagcatggtgtgtctgaagctccctggaggttcctacatggcaaagctgacagtgacactgatggtgctgagctccccactggctttggctggggacacccgaccacgtttcttgcagcaggataagtatgagtgtcatttcttcaacgggacggagcgggtgcggttcctgcacagagacatctataaccaagaggaggacttgcgcttcgacagcgacgtgggggagtaccgggcggtgacggagctggggcggcctgacgctgagtactggaacagccagaaggacttcctggaagacaggcgcgccgcggtggacacctactgcagacacaactacggggttggtgagagcttcacagtgcagcggcgagttgagcctaaggtgactgtgtatcctgcaaggacccagaccctgcagcaccacaacctcctggtctgctctgtgaatggtttctatccaggcagcattgaagtcaggtggttccggaacagccaggaagagaaggctggggtggtgtccacaggcctgattcagaatggagactggaccttccagaccctggtgatgctggaaacagttcctcgaagtggagaggtttacacctgccaagtggagcacccaagcgtgacgagccctctcacagtggaatggagagcacagtctgaatctgcacagagcaagatgctgagtggagtcgggggctttgtgctgggcctgctcttccttggggccgggctattcatctacttcaagaatcagaaagggcactctggacttcacccaacaggactcgtgagctgaagtgcagatgaccacattcaagggggaaccttctgccccagctttgcatgatgaaaagctttcctgcttggctcttattcttccacaagagaggactttctcaggccctggttgctaccggttcagcaactctgcagaaaatgtccatccttgtggcttcctcagctcctgcccttggcctgaagtcccagcattgatggcagtgcctcatcttcaactttagtgctcccctttacctaaccctacggcctcccatgcatctgtactccccctgtgtgccacaaatgcactacgttattaaatttttctgaagcccagagttaaaaatcatctgtccacctggctccaaagacaaaaaataaaaa

SEQ ID NO: 56 - DNA, 1152 bp, Homo sapiens
tcctcacaattgctctacagctcagagcagcaactgctgaggctgccttgggaagaagatgatcctaaacaaagctctgctgctgggggccctcgccctgactgccgtgatgagcccctgtggaggtgaagacattgtggctgaccatgttgcctcctatggtgtgaacttctaccagtctcacggtccctctggccagtacacccatgaatttgatggagacgaggagttctatgtggacctggagacgaaagagactgtctggcagttgcctatgtttagcaaatttataagttttgacccgcagagtgcactgagaaatatggctgtgggaaaacacaccttggaattcatgatgagacagtccaactctaccgctgccaccaatgaggttcctgaggtcacagtgttttccaagtttcctgtgacgctgggtcagcccaacaccctcatctgtcttgtggacaacatctttcctcctgtggtcaacatcacctggctgagcaatgggcactcagtcacagaaggtgtttctgagaccagcttcctctccaagagtgatcattccttcttcaagatcagttacctcaccttcctcccttctgctgatgagatttatgactgcaaggtggagcactggggcctggacgagcctcttctgaaacactgggagcctgagattccagcccctatgtcagagctcacagagactttggtctgcgccctggggttgtctgtgggcctcatgggcattgtggtgggcactgtcttcatcatccaaggcctgcgttcagttggtgcttccagacaccaagggctcttatgaatcccatcctgaaaaggaaggtgcatcaccatctacaggagaagaagaatggacttgctaaatgacctagcactattctctggcctgatttatcatatcccttttctcctccaaatgtttcttctctcacctcttctctgggacttaaggtgctatattccctcagagctcacaaatgcctttcaattctttccctgacctcctttcctgaatttttttattttctcaaatgttacctactaagggatgcctgggtaagccactcagctacctaattcctcaatgacctttatctaaaatctccatggaagcaataaattcccttt

SEQ ID NO: 57 - DNA, 1158 bp, Homo sapiens
gcctgctgctctggcccctggtcctgtcctcttctccagcatggtgtgtctgaagctccctggaggctccagcttggcagcgttgacagtgacactgatggtgctgagctcccgactggctttcgctggggacacccgaccacgtttcttggagctgcgtaagtctgagtgtcatttcttcaatgggacggagcgggtgcggtacctggacagatacttccataaccaggaggagttcctgcgcttcgacagcgacgtgggggagtaccgggcggtgacggagctggggcggcctgtcgccgagtcctggaacagccagaaggacctcctggagcagaagcggggccgggtggacaattactgcagacacaactacggggttggtgagagcttcacagtgcagcggcgagtccatcctcaggtgactgtgtatcctgcaaagacccagcccctgcagcaccacaacctcctggtctgctctgtgagtggtttctatccaggcagcattgaagtcaggtggttccggaacggccaggaagagaaggctggggtggtgtccacgggcctgatccagaatggagactggaccttccagaccctggtgatgctagaaacagttcctcggagtggagaggtttacacttgccaagtggagcacccaagcgtaacgagcgctctcacagtggaatggagagcacggtctgaatctgcacagagcaagatgctgagtggagtcgggggctttgtgctgggcctgctcttccttggggccgggctgttcatctacttcaggaatcagaaaggacactctggacttcagccaacaggattcctgagctgaagtgcagatgacaatttaaggaagaatcttctgccccagctttgcaggatgaaaagctttcccgcctggctgttattcttccacgagagagggctttctcaggacctagttgctactggttcagcaactgcagaaaatgtcctcccttgtggcttcctcagttcctgcccttggcctgaagtcccagcattgatggcagcgcctcatcttcaacttttgtgctcccctttgcctaaaccctatggcctcctgtgcatctgtactcaccctgtaccacaaacacattacattattaaatgtttctcaaagatggagtt

SEQ ID NO: 58 - DNA, 1788 bp, Homo sapiens
gctgtcgaagcgcgcgaactcctcccggttgtagatgtatctctccaggaagcgctgtgtcccattaaacgcgtagcattcctgccgtccctggaaaagtgctagaggcccacagtttcagtctcatctgcctccactcggcctcagttcctcatcactgttcctgtgctcacagtcatcaattatagaccccacaacatgcgccctgaagacagaatgttccatatcagagctgtgatcttgagagccctctccttggctttcctgctgagtctccgaggagctggggccatcaaggcggaccatgtgtcaacttatgccgcgtttgtacagacgcatagaccaacaggggagtttatgtttgaatttgatgaagatgagatgttctatgtggatctggacaagaaggagaccgtctggcatctggaggagtttggccaagccttttcctttgaggctcagggcgggctggctaacattgctatattgaacaacaacttgaataccttgatccagcgttccaaccacactcaggccaccaacgatccccctgaggtgaccgtgtttcccaaggagcctgtggagctgggccagcccaacaccctcatctgccacattgacaagttcttcccaccagtgctcaacgtcacgtggctgtgcaacggggagctggtcactgagggtgtcgctgagagcctcttcctgcccagaacagattacagcttccacaagttccattacctgacctttgtgccctcagcagaggacttctatgactgcagggtggagcactggggcttggaccagccgctcctcaagcactgggaggcccaagagccaatccagatgcctgagacaacggagactgtgctctgtgccctgggcctggtgctgggcctagtcggcatcatcgtgggcaccgtcctcatcataaagtctctgcgttctggccatgacccccgggcccaggggaccctgtgaaatactgtaaaggtgacaaaatatctgaacagaagaggacttaggagagatctgaactccagctgccctacaaactccatctcagcttttcttctcacttcatgtgaaaactactccagtggctgactgaattgctgacccttcaagctctgtccttatccattacctcaaagcagtcattccttagtaaagtttccaacaaatagaaattaatgacactttggtagcactaatatggagattatcctttcattgagccttttatcctctgttctcctttgaagaacccctcactgtcaccttcccgagaataccctaagaccaataaatacttcagtatttcagagcggggagactctgagtcattcttactggaagtctaggaccaggtcacatgtgaatactatttcttgaaggtgtggtttcaacctctgttgccgatgtggttactaaaggttctgatcccacttgaacggaaaggtctgaggatattgattcagtcctgggtttttccctaactacaggatagggtggggtagagaaaggatatttgggggaaattttacttggatgaagattttcttggatgtagtttgaagactgcagtgtttgaagtctctgagggaagagatttggtctgtctggatcaagatttcaggcagattaggattccattcacagcccctgagcttccttcccaaggctgtattgtaattatagcaatatttcatggaggatttttctacatgataaactaagagccaagaaataaaatttttaaaatgccctaaaaaaaaaaaaaaaaaa

SEQ ID NO: 59 - DNA, 1712 bp, Homo sapiens
gctgtcgaagcgcgcgaactcctcccggttgtagatgtatctctccaggaagcgctgtgtcccattaaacgcgtagcattcctgccgtccctggaaaagtcatcaattatagaccccacaacatgcgccctgaagacagaatgttccatatcagagctgtgatcttgagagccctctccttggctttcctgctgagtctccgaggagctggggccatcaaggcggaccatgtgtcaacttatgccgcgtttgtacagacgcatagaccaacaggggagtttatgtttgaatttgatgaagatgagatgttctatgtggatctggacaagaaggagaccgtctggcatctggaggagtttggccaagccttttcctttgaggctcagggcgggctggctaacattgctatattgaacaacaacttgaataccttgatccagcgttccaaccacactcaggccaccaacgatccccctgaggtgaccgtgtttcccaaggagcctgtggagctgggccagcccaacaccctcatctgccacattgacaagttcttcccaccagtgctcaacgtcacgtggctgtgcaacggggagctggtcactgagggtgtcgctgagagcctcttcctgcccagaacagattacagcttccacaagttccattacctgacctttgtgccctcagcagaggacttctatgactgcagggtggagcactggggcttggaccagccgctcctcaagcactgggaggcccaagagccaatccagatgcctgagacaacggagactgtgctctgtgccctgggcctggtgctgggcctagtcggcatcatcgtgggcaccgtcctcatcataaagtctctgcgttctggccatgacccccgggcccaggggaccctgtgaaatactgtaaaggtgacaaaatatctgaacagaagaggacttaggagagatctgaactccagctgccctacaaactccatctcagcttttcttctcacttcatgtgaaaactactccagtggctgactgaattgctgacccttcaagctctgtccttatccattacctcaaagcagtcattccttagtaaagtttccaacaaatagaaattaatgacactttggtagcactaatatggagattatcctttcattgagccttttatcctctgttctcctttgaagaacccctcactgtcaccttcccgagaataccctaagaccaataaatacttcagtatttcagagcggggagactctgagtcattcttactggaagtctaggaccaggtcacatgtgaatactatttcttgaaggtgtggtttcaacctctgttgccgatgtggttactaaaggttctgatcccacttgaacggaaaggtctgaggatattgattcagtcctgggtttttccctaactacaggatagggtggggtagagaaaggatatttgggggaaattttacttggatgaagattttcttggatgtagtttgaagactgcagtgtttgaagtctctgagggaagagatttggtctgtctggatcaagatttcaggcagattaggattccattcacagcccctgagcttccttcccaaggctgtattgtaattatagcaatatttcatggaggatttttctacatgataaactaagagccaagaaataaaatttttaaaatgccctaaaaaaaaaaaaaaaaaa

SEQ ID NO: 60 - DNA, 1698 bp, Homo sapiens
ctgcctggggagcccccccgccccacatcctgccccgcaaaaggcagcttcaccaaagtggggtatttccagcctttgtagctttcacttccacatctaccaagtgggcggagtggccttctgtggacgaatcagattcctctccagcaccgactttaagaggcgagccggggggtcagggtcccagatgcacaggaggagaagcaggagctgtcgggaagatcagaagccagtcatggatgaccagcgcgaccttatctccaacaatgagcaactgcccatgctgggccggcgccctggggccccggagagcaagtgcagccgcggagccctgtacacaggcttttccatcctggtgactctgctcctcgctggccaggccaccaccgcctacttcctgtaccagcagcagggccggctggacaaactgacagtcacctcccagaacctgcagctggagaacctgcgcatgaagcttcccaagcctcccaagcctgtgagcaagatgcgcatggccaccccgctgctgatgcaggcgctgcccatgggagccctgccccaggggcccatgcagaatgccaccaagtatggcaacatgacagaggaccatgtgatgcacctgctccagaatgctgaccccctgaaggtgtacccgccactgaaggggagcttcccggagaacctgagacaccttaagaacaccatggagaccatagactggaaggtctttgagagctggatgcaccattggctcctgtttgaaatgagcaggcactccttggagcaaaagcccactgacgctccaccgaaagtactgaccaagtgccaggaagaggtcagccacatccctgctgtccacccgggttcattcaggcccaagtgcgacgagaacggcaactatctgccactccagtgctatgggagcatcggctactgctggtgtgtcttccccaacggcacggaggtccccaacaccagaagccgcgggcaccataactgcagtgagtcactggaactggaggacccgtcttctgggctgggtgtgaccaagcaggatctgggcccagtccccatgtgagagcagcagaggcggtcttcaacatcctgccagccccacacagctacagctttcttgctcccttcagcccccagcccctcccccatctcccaccctgtacctcatcccatgagaccctggtgcctggctctttcgtcacccttggacaagacaaaccaagtcggaacagcagataacaatgcagcaaggccctgctgcccaatctccatctgtcaacaggggcgtgaggtcccaggaagtggccaaaagctagacagatccccgttcctgacatcacagcagcctccaacacaaggctccaagacctaggctcatggacgagatgggaaggcacagggagaagggataaccctacacccagaccccaggctggacatgctgactgtcctctcccctccagcctttggccttggcttttctagcctatttacctgcaggctgagccactctcttccctttccccagcatcactccccaaggaagagccaatgttttccacccataatcctttctgccgacccctagttccctctgctcagccaagcttgttatcagctttcagggccatggttcacattagaataaaaggtagtaattagaacaaaaaaaaaaaaaaaaaa

SEQ ID NO: 61 - DNA, 4055 bp, Homo sapiens
gtcacagaagactacttgggttcatggtctctaatatttcaaacaggagctccctttagcgagtccttcttttcctgactgcagctcttttcattttgccatccttttccagctccatgatggttctgcaggtttctgcggccccccggacagtggctctgacggcgttactgatggtgctgctcacatctgtggtccagggcagggccactccagagaattaccttttccagggacggcaggaatgctacgcgtttaatgggacacagcgcttcctggagagatacatctacaaccgggaggagttcgcgcgcttcgacagcgacgtgggggagttccgggcggtgacggagctggggcggcctgctgcggagtactggaacagccagaaggacatcctggaggagaagcgggcagtgccggacaggatgtgcagacacaactacgagctgggcgggcccatgaccctgcagcgccgagtccagcctagggtgaatgtttccccctccaagaaggggcccttgcagcaccacaacctgcttgtctgccacgtgacggatttctacccaggcagcattcaagtccgatggttcctgaatggacaggaggaaacagctggggtcgtgtccaccaacctgatccgtaatggagactggaccttccagatcctggtgatgctggaaatgaccccccagcagggagatgtctacacctgccaagtggagcacaccagcctggatagtcctgtcaccgtggagtggaaggcacagtctgattctgcccggagtaagacattgacgggagctgggggcttcgtgctggggctcatcatctgtggagtgggcatcttcatgcacaggaggagcaagaaagttcaacgaggatctgcataaacagggttcctgagctcactgaaaagactattgtgccttaggaaaagcatttgctgtgtttcgttagcatctggctccaggacagaccttcaacttccaaattggatactgctgccaagaagttgctctgaagtcagtttctatcattctgctctttgattcaaagcactgtttctctcactgggcctccaaccatgttcccttcttcttagcaccacaaataatcaaaacccaacatgactgtttgttttcctttaaaaatatgcaccaaatcatctctcatcacttttctctgagggttttagtagacagtaggagttaataaagaagttcattttggtttaaacataggaaagaagagaaccatgaaaatggggatatgttaactattgtataatggggcctgttacacatgacactcttctgaattgactgtatttcagtgagctgcccccaaatcaagtttagtgccctcatccatttatgtctcagaccactattcttaactattcaatggtgagcagactgcaaatctgcctgataggacccatattcccacagcactaattcaacatataccttactgagagcatgttttatcattaccattaagaagttaaatgaacatcagaatttaaaatcataaatataatctaatacactttaaccattttctttgtgtgccatcacaaatactccttaaccaaatacggcttggacttttgaatgcatccaatagacgtcatttgtcgtctaagtctgcattcatccaccagcctaggcctcctgtcttaattttcatacagacagaaatgactccccactggggaaagagcaaagcaatacatgtagcactctttttcaaacactggtctttttttttttcttaacaatccaacattgttatgtgttttgcgtctcatattgacaccttttggtcaaggtagaggacatgtttgttgtaagctttctttttcgtgtagaggatggattcttcactcctgatacacacaatcagtgcacagcagctctcttatacatccagttgatgccttcagtctccctggcttcttacaagcatcttctgggccttgtgtgtccctgggcacctgtccctggtcaattcccgaaagctactgtgctcctcttgcccatctccccttgcaaataatatcttccatcgggggaccggcttcctccaatttcaggagaggtggggctgaaggcacagacttgggcgtcactggcacagatataagtaaatacagctggagtctgcagagaggctggactgagtcagggagtcaggaaagagaagccacacacaaggacaaccaatcatgtttctcataatcttcttaacctagggaataggacacaatcattttttctttttaaaacatctttatccctgatcagcctcatttcctcaaaaactataaaggaaaatgctgctgacttgtttttgcgtagtaatttcagctgtcacataataagctaaggaagacagtatatagtaaataaggaccctttatctgtcttattttcccttttggcttcacaggaaacttgtgagaaacctatgcagcataaaattaatatgatttcaatccagggattcaacgatggaaggaggtcatgagaatagcagaaagtcttcaaatcgagatcattatgaaatcctcagacccagagcacataaatcctaccctcagagtcactgagcagttaacattacaaattacaaaccatatccagtcagagtcattctctttcctgcttgtctcctgtactcatgttacaggttagggcagtaccccgagtggagtgaacaatctctggactaacacttgtcaggatcagaagctgaggtatctgcacccacattacaggaacaggatatgtgctcctagggaactgagggtgtcaggagatgaggaatgtccctggagtcacagaaagaaggtatcagatgtgtctcactctgacatatgcaggtgtttatgaaactctgggatttctaaggaaggatgcagtgcagagacaggtcccagaggagacaagagctgagagaccatccaaactgggaccaccttgtcactagacttcaaattttcaatattgatagagtgttttctaagagtcaggccctttgctgagtgctatgtgcagcaggatcaaaggcagccaggaggtagaggagtcttgaggtacatcagtcattggagttgaagagcagagattcaaaggaaagttggaactggagctttaaaggagatgtgaagtgggtgactcaacctctgactcagaaaaattgatacctgcagaagaaaaaacccggcgggcttaggactcccagctgagtgttgtatcctccatccctttccacctggtcccttcattttctacccctcacagttccctaacgagaaggtggtccacccaacagacaacactgcctcagatggttatcaaggggtaccctaagaagaaatcatctcaccctctctttgtccccatttgtcaagtagcagtgaggccgagccaggggatggtgaaagtggaaggaggtgggagttgggcatcgggtgtgaagatgctcttgaaaggggttttaataaccacttgctaccaggccagtgaacacttaccatagttgatgccttttgagcatgttgcattgtaaactgtccctgaaattactgtgcacttggcttatgggatgaaacatcctcctagttcttttgtctctcagcttctctgaagtctcattgagcaccttctcttcaatttcttttacacagtaagaataggatcagctgtgctaaactaacaaatacccagatatccaggtttggctcatgttacacgtccaaagtaagtcatgcaggaagctctgctcatcatcgtactcaggaagtcaggctgacagtctttctcctgcacatctgctcccagaacctccccagcagaatgaagggaacctaagaatttattcactggcttttaatgatccctcctagaaagaacacacttctcgcatttcattttccaatgtaaatcatatggctgcaactaacttcaaataagtgggaatacttgaaggtggaaaacatttaagaagtacacactaaataaataataaaatacttctacaagaga

SEQ ID NO: 62 - DNA, 1312 bp, Homo sapiens
ttttaatggtcagactctattacaccccacattctcttttcttttattcttgtctgttctgcctcactcccgagctctactgactcccaacagagcgcccaagaagaaaatggccataagtggagtccctgtgctaggatttttcatcatagctgtgctgatgagcgctcaggaatcatgggctatcaaagaagaacatgtgatcatccaggccgagttctatctgaatcctgaccaatcaggcgagtttatgtttgactttgatggtgatgagattttccatgtggatatggcaaagaaggagacggtctggcggcttgaagaatttggacgatttgccagctttgaggctcaaggtgcattggccaacatagctgtggacaaagccaacctggaaatcatgacaaagcgctccaactatactccgatcaccaatgtacctccagaggtaactgtgctcacaaacagccctgtggaactgagagagcccaacgtcctcatctgtttcatagacaagttcaccccaccagtggtcaatgtcacgtggcttcgaaatggaaaacctgtcaccacaggagtgtcagagacagtcttcctgcccagggaagaccaccttttccgcaagttccactatctccccttcctgccctcaactgaggacgtttacgactgcagggtggagcactggggcttggatgagcctcttctcaagcactgggagtttgatgctccaagccctctcccagagactacagagaacgtggtgtgtgccctgggcctgactgtgggtctggtgggcatcattattgggaccatcttcatcatcaagggattgcgcaaaagcaatgcagcagaacgcagggggcctctgtaaggcacatggaggtgatggtgtttcttagagagaagatcactgaagaaacttctgctttaatggctttacaaagctggcaatattacaatccttgacctcagtgaaagcagtcatcttcagcattttccagccctatagccaccccaagtgtggatatgcctcttcgattgctccgtactctaacatctagctggcttccctgtctattgccttttcctgtatctattttcctctatttcctatcattttattatcaccatgcaatgcctctggaataaaacatacaggagtctgtctctgctatggaatgccccatggggcatctcttgtgtacttattgtttaaggtttcctcaaactgtgatttttctgaacacaataaactattttgatgatcttgggtggaaaaaaaaaaaaaaaaaaaaaaaaaaaaaaaaaa

SEQ ID NO: 63 - DNA, 3485 bp, Homo sapiens
cttcttctttacctccgccttgttcctgtcctcaccacacggactgagactgatttgattaaagcaccagagtgtaatggccctcagagcagggctggtcctggggttccacaccctgatgaccctcctgagcccgcaggaggcaggggccaccaaggctgaccacatgggctcctacggacccgccttctaccagtcttacggcgcctcgggccagttcacccatgaatttgatgaggaacagctgttctctgtggacctgaagaaaagcgaggccgtgtggcgtctgcctgagtttggtgactttgcccgctttgacccgcagggcgggctggccggcatcgccgcaatcaaagcccatctggacatcctggtggagcgctccaaccgcagcagagccatcaacgtgcctccacgggtgaccgtgctccccaagtctcgggtggagctgggccagcccaacatcctcatctgcatcgtggacaacatcttcccccctgtgatcaatatcacctggctgcgcaacggccaaactgtcactgagggagtggcccagaccagcttctattcccagcctgaccatttgttccgcaagttccactacctgcccttcgtgccctcagccgaggacgtctatgactgccaggtggagcactggggcctggatgcgccactcctcaggcattgggagctccaggtgcctattccaccaccagatgccatggagaccctggtctgtgccctgggcctggccatcggcctggtgggcttcctcgtgggcaccgtcctcatcatcatgggcacatatgtgtccagtgtccccaggtaatgatccttctgagagaaatgacttgtgggagacaccctgcagatcctcatgggtttgtgacagcccctgcgtgctcagtgccctttaagtgcatcccgctgtgctgactttgagtgggatcaacatctgtcctacgggtcccctcttttttggccccagtattcatggcagggtttgttggacacctactagcttcccttcccattcaacacacacacacattcttgctctacccaaagctctggctggcagcactaaatgctttggtggtgtttgcactgtgtcctttccaggccttggccagttcttccaggggtgaggcatgtggtgctggggattggcagccatcctggggcccacacaggtgtgtcttgctccatttggcccattgtgtgttactttgtgaatgagccatttcacatggacttcatgaaatttgcctcctgagttcaggtttaccctgaaagggatgcagattatcctgttcctcacgaccccctcagctaacaacagttctgaagggtgctgggacaggacaggctcatggggactccactcctgcctgggtttactctgtatgaagaggccactggtatcctgccatgatgttatctcctttttctacttttccctagagtcccatgcatgataaagagaggcccaaggcttggataaggtggccacttccctcagtggagtcagtcatgttaggtaggaggtggtagagtcggtctgcgaggtatctcgtaagaggggaggtccacctagacacactctaaatatgtggcctagaagattttggtctacttttctgtgaacagaatttaaaacatacaaagagataaatcaccataccacatagtttatgtcaggaccaaaatgagcaatacagattacggttttcaaaccagaatgcacataagaactgcttgggatccttttaaaagtacaggcattggcctggtgcagtggctcattcctgtaatcccagcactttgggaggccaaggggacaggactgcttgaggccaagaggtggaaaccatcttgggctacatagagagaccccatctctacaaagaaagatttaaaaattaaccaggcatggtggctcgcacctgtattcccagccactggggaggctgaggccggaggagtgcttgagcccaggagttcaaggctgcagtgagccaagattgcgccactgcactccagcctaggtgacagagtgagaccctgtctctaaataaataaataaataaaatataaaaataacagtcatcacccagacctactgaattagaatctcgggagtgcagggggcagcaacagggaggctgtcttttctgagatggggtctcactctgtcaccaggctggagtgccatggcatgatctcagctcactgcaacctccacctcctgagttcaagccattctcctgcctcagcctcctgagtagctgggactacaggtgtgcgccactacactcagctaatttttgtattttaagtagagacggggtttcatcatgttggccaggatggcctccatctcttgacctcgtgatccacccaccttccctcccaaagtactggaattacaggcattagccactgtgcccagccgaggctgtcatttttaaccggctctggatgactctgatgcagccatcctggaccttggctgtggtctggtaactggaacccagtgacgtaatcaggtgccatcgggggtcatgggaaagggggatccccaaggtctgaggtggactaggaaggctttctgaagaacctgggtctgttagggcatcagccaatcaaggtacaagtaaatagaggcaaaatgagggtttgaactgtgagcagttggtcctggaaaagaaagaaaccaagagattatggggactcaatgggcttcttaagagagaataagttgaaatcaatgaccagaagaccctgatggaagtggaggagaatcatctcaggcaaactttttgtgtgccagtaacagaaaccctctttgtgtgatcacatgcaaagtataggatatttgcaatatagccatggggaggagtgcagggcccaagggtagattttagccaggcctcccaggaacagaactcggatccgaaaagcccagagaagctagagctgcccctccaacactctcggatccacatggtctgtgttctctagacccccctgcatgttagcggtgttctctctctgtggactgactgtccttctcagtgaacatgtccacccgacagctcctgagtttatatcatctcaaccctcacaacccacagaggctgtgtctcctagtcacagctttaaattactggaaaaataaatgactggccaaacttggagcaggtgtccatcccagccctgtgtagttagagcaggaatcaagatctcaacacaaatgtggctgccaagcactcagccccggggcgaggggtcaagttcttctcagagaaagaggaataagttggttctcagaagacatcacaagatacgtgtgtacccaacaatctctgatctctgctgatcttttgcttagacgttaacttgatgcatcattggaaaggtgtttctctcatctctgtcctaaggcttgataaagtcattaaaattgtgttcttttgactaaa

SEQ ID NO: 64 - DNA, 1122 bp, Homo sapiens
tccggcaggtacataagatccattaggtttgagctgtgttgactaccactgctttttccttggtctcacttacgtcttggaagatggctctgcagatccctggaggcttttgggcagcagctgtgaccgtgatgctggtgatgctgagcaccccagtggctgaggccagagactttcccaaggatttcttggtccagtttaagggcatgtgctacttcaccaacgggacagagcgcgtgcgcggtgtggccagatacatctataaccgcgaggagtacgggcgcttcgacagcgacgttggggagttccaggcggtgaccgagctggggcggagcatcgaggactggaacaactataaggacttcttggagcaggagcgggccgcggtggacaaggtgtgcagacacaactacgaggcggagctgcgcacgaccttgcagcggcaagtggagcccacagtgaccatctccccatccaggacagaggccctcaaccaccacaacctgctggtctgctcggtgacagatttctatccagcccagatcaaagtccggtggtttcggaatgaccaggaggagacagccggtgttgtgtccacctccctcattaggaatggtgactggaccttccagattctggtgatgctggaaataactccccagcgtggagacatctacacctgccaagtggagcaccccagcctccagagccccatcaccgtggagtggcgacctcgagggcctccaccagcaggactcctgcactgactcctgaggacttttgtctgggattggtcatcactcttctgtaatgcccacctgcccctgcccagaattcctagctgcctgtgtcaccctgtcccactgaggtcagagtcctacagtggctcatgcagccacaggtcaccttctgtgatccccatcccaaggcactggtggtgactctgcttcctgcactgacccagagcctctgcctgtgcactgcaagctgtgtctactcaggccccaaggggcatctctgtttccattctccccccacagacctgtcaagagaagcatgacaaacaaaatcatttacctgactttagtgctttttcccataattaaacctgattctgagtta

SEQ ID NO: 65 - DNA, 7584 bp, Homo sapiens
agaatcttctgtaggcctttctcttgccttcttttattcacaactgatgacactgcatatcttcccctgttcttattgggagaaggccttgtgtgtcaccaagaggttctcagaagggacctgtcagtttttggttaaaagaacccggaaagagaaggactatgggggaactgatggcgttcctgttacctctcatcattgtgttaatggtgaagcacagcgattcccggacgcactctctgagatattttcgcctgggcgtttcggatcccatccatggggtccctgaatttatttcggttgggtacgtggactcgcaccctatcaccacatatgacagtgtcactcggcagaaggagccacgggccccatggatggcagagaacctcgcgcctgatcactgggagaggtacactcagctgctgaggggctggcagcagatgttcaaggtggaactgaagcgcctacagaggcactacaatcactcagggtctcacacttaccagagaatgattggctgtgagctgctggaggatggaagcaccacaggatttctgcagtatgcatatgacgggcaggatttcctgatcttcaataaagacaccctctcctggctggctgtagataatgtggctcacaccatcaagcaggcatgggaggccaatcagcatgagttgctgtatcaaaagaattggctggaagaagaatgtattgcctggctaaagagattcctggagtatgggaaagacaccctacaaagaacagaatcagaaactatccctcttgtgatgaaagctgtctctgggtccattgtccttgtcattgtgctggctggagttggtgttctagtctggagaagaaggccccgagagcaaaatggagccatctaccttccaacaccagatcgatgattgcagatccctcttttccagttctccttcctctaggagccatgttatcctctgtcccccatagagtcaagcctagtgcttgaaggtcctgacgacacccacaacatacatgagagtaatgggattgagcatttatggcagcaacagaggagccacaaaatgttctttgttctttggctccaaaaagactgtcagctttcagtctcttttgatggactgttttatcagagttgactttaaatacagcttgtctcatgacacaacgcttccctacattctatttgtcaatgatgatttgcaactagttggagattctcagagcaggaaggaatcttttcaaccagagcaggaactgtcttctgcaatgccttggacttgagcctccagcctccacttgaacaccatgtgaagggaacctcagtacttcataaaatggcctttctcattcatctttcatgggaacatttattgtacaagcgctttgaatatcatgggcaccatgactgtgaccctacaggtaggattggatcactccatgagagtagccggcaggtttctacaatggcctgggaatggactgattatttttatacattttctggcctgagagaaagccaaagtcccctgctgttcacagcaaccctgcctgggagcttggaatcttggtaatctgcccggttggatctatggaggtagtctcaccctttttgtcttttgtgggaaattaagagaaataattatcagacatatcatcacctccagtggaactacagagacctggacccagctgcactattttaatgtaaaaataacagtatggccaggtgcagtggctcacgcctgtaatcccatcactttgagcagccaaggcgggcggatcacgaggtcaggagattaagaccatcctggccaatatggtgaaaccctgtctctactaaaatacaaaaaattagctgggcatggtgttgcgtgcctgtagtcccagctacttgggaggctgagacaggggaattgcttgaacccgggaggcagagattgcagtgagccgagatcacgccactgcactccagcctggcgacagagtgagactctatctcaaaataataataataataataataataataataataataataacagtatatttggtgtcaggagagggctcaattctcatttctgcctttcctgtgctggctcatggtagctgggcatgacttgccttcctacataggttgtcttcatacatatgcactgggaatcaataaaagcccatggtgagaatgaacatccccttaatgttccttactatccccaacccctgaggcctcacctactgccctgccatgtggagctacttgccctggggctgccagtcacacattcctcggtcctacttctctgaccccgtttgactctgcacctgagccctaatgcttacttcagtgacctgaactttgacaagtggcttttgtcctgcacctcaggtttgacctctgctctcccttgaccttgactgtgacatttgacctttggctttaatcattacagcctcagataaaggtaccttcagcccgggcacagtggctcacgcctgtaatcctagcactttgggaggctgaggcaggcggattccctgagctcaggagttcaagaccagcctgggcaacacggtgaaaccctgtctctactaaaatacaaataattagctgggcatggtggcatgtgcctatagtcccagctacttgggaggctaaggcaggagaatcacttgaatctataaggcagaggtggcagtgagccgagatcacaccactgcactccagcctgggcaacggagcaagactctgtctccaaaaaaaaaaagaaagataccctcagtgtgccaggcctctaagagctcacctgccaggcttcctccttgctccactgtcccatgtaattccatatatgaagctaccactgtacatctctcttttccggtgcctgttgagttgcatagaagcacagttgtgtttattttgtttttagggttgccatgggcaatttccgtgccacttttaagcagtgttgcactgtgaagagaatgtaggcaagtttatttctggaatggtttcttcttacaatcagaatagttaggatgtaatatatttttgggtgggcatttaaagtgaaaaggtacatatttacatagacacaggtgataatgtatctatgtaaatgccttttgattctgcaactgcaggatactctcatcaaagacacagataaaaagcctctgtgtttccaaggccttgccctacacctaacacataatatgtccaaatggatgaagaggaggcaaggacaaggatgtgatgacaaaacattctgttatgcacttgtagcatttatgtttcttcctgggggattttataatactaaaagaatcataatataaagagatgattaaaaaaaaaatactgccgggcacggtggctcatgcctgtaatcccagcattttgggaggccgaggtgggcagatcacctgaggtcgggagttcgagaccagcctgaccaacatggagaaaccctgtctctaccaaacatacaaaattagccggggatggtggcgcatgcctataatcccagctactcgggagtctgaggcagaagaaccgcttgaacccgggaggcagaggttgtggtgagccgagatcgcgccatcgcactctagcctgggcaacaagagtgaaactccatctcaaaaaaataaaaataaaataagtaagtaatacctaaaattctgcaaccttcattttactatagatggttgaagattatattacttcttaattgttttagccttgttattgcttcattacttcatggttgttgagtacagatgctcagtaatcataacctatgaaatatttgacaccatgatctaaacattaaaaacaaataactgtgctattgccacagctatgttttggctttgaattttctttactgaatattttggatcaagaacactagatgagaaacctgttcaactctgttcttttttttttttttaactccactgtatttattacctgtttttgttttttttgtttgtttgtttttgatgtgcatatagaccaagatgtggtaaatttaaatggcagatgtttttgatgtggtacatttaagggagagaaagcagtttaaagagcagggtgaaaaatccaacaagactccatcgagagtttctgagctctcccatcaggggccagtcctcctttcctctctcctcttactcccatgatttccaagttgtgatcctttccttatttctgaggaatgacttggtttctcctcttctttttttggcctgagagaagatgtttttgcacttgtagctatgaggaacagattgtccactagggaggccagctgatcattttctgccagagtcacacagagcagtcacaccttattttgaaaaccactgtctggggtctttgtcctcacatatgcaggtctagtgtccccacaaagtgatcagatggatatataaagtggagtgccaatgtattaatttactgtgagaaacacaattgctaagtgggtcagatatctgtctcagctggtcagtacaccttccagcaggaaaatctacataagaacaactaaatcacaatctgtagagtgcttgatgaccccagaattggtgcaaggggacacattcttgcttgttagcacctgctctctggagtttgctattttctcacacacagtgtattagttcacagaatgttctccaaggaggacagggggctttgcccatagccatgtgctgtgggcagcagagctaggaagaagcacaggcatctcccagcccaggtgtttcccacttaactgcattgcccttttcatcttttttttttccccaatagcttcaggacattcagtacattgtgctttttagaggttgatgattccactgcctgagctgccttcacctctctttctttggaaattgccatctttgagcattgtatgtctctgtaacatctctgcatctccttttcactctggcctccctttctccattgtccttctagcttctggttgccccaaaccccacagactgtgtaacaaaacccaaaacctattggtttaaaacaatacccattttattttctttcatagtttctatgggtcaggaatttggatatggcttgggtaagcagttctggcttctcatggagttggaggcaagtggtggctggaacagaaatggggcagccaggggtggtggccaggcatcagctacatctcctccatgtagtctcaggaactctccatgtaatctctctgtgtgggttgggcttcctcacaacatggtggcctcagggcagtcactgcttacatggcagctagcttccctcagagtgagtatcccaagagatcacagtcaaagtgcatagcatttatataatctaatcttggaagtcacaaaatgtcattcttgtgatactctcattggtgaagaagtcataaaatcctgctcaggttcaaaaagagggtgtatagaacccaacactcaataggaagattgtcagagttacattgtaagaagagcatgtagttgggagatatcattgtggccattttgggaaagatgcaacatgtcacaatgtcatgttctccatcgtctccccgttccaccttgtactggtttccaagggtagtcgtttaaaagtaccacaaaaactgggtggcttggaacaacagaaatttattgtttcacagttctggaggccagaagttcaaaatgaagtgttggcagaaacatgctgcctctaaagggactgggaaaggatctgttccaggcttccctcctatcttctggttgttccttgccttctggctgcgtaactctagtcttcatttggtgttctccctgcatgcatggctttgtgtccaaatttccttttttcatgaggccatcagtcatactggattagggacccactctactactgcaggatgacctcaccttcccaaattacatctgcaacaaccctatttccaaagaaggccacattctgaggtactgggggttataacttcaacatgaattttttggaggaaacaattcaactcctaacacatctctacccaacctctgtaggttccctcaatccaccaaaattttttggctccactggattatctagcagttaggaaaccaagatcattaaatgaattcaccgcaactacagtgagactgactaccttagcttacctctgtgaaaggagttaagccaaaggaatctgtggaattttggagagtttgggagcatttgggggcaggaggcaaatgttcttcctttaaatcacaacacttagttctcttccatttataagactcacccctccatcccaacccctgcaccacaggacaaggaagtgttcttggtcttcaactttcatccctgatggtgaaagcagttgctcctgacctatttgcccaccagcttctcctctggagcctgaggcttctgatgcctgcctggctggttctcagtaagaaggtcaagttcaaccagaggggagatgctgatgcctttcagtacttaaatatgagttcagaccctggggcctggacataagatttggggtcccctggatataagatttctgaaaacactcagactgtggagacccctgctgagggagaagccccaaactgtggcttcaggggaatgcaccaaggctctcattgaggccaccttctccaacaagctcccctcctgcttccccatggctggcatggctgaggaaaaaggacactgagcacagcccgtgcatgagcggcttgccatgcaacaggataaaacccataatgccactcagcaagccttggttgtaaatctagtttgattacatttgtaatcaaatgatggccatttgttctgtttctggtttgtgaaccaactgaagacataagcagggcctcagctaacccacaaatagcacatgtgtgcaaactggaaaaatgaacccttcttctgggaggacgccagcccaggccaggtcacccggcttggccagcagaacacagagtagattttggtcccgtttgttccccagtggggtatctatccttgtgcagggcacaagcctacatggtggctctggtcatatcattagaaaatagacagaaatgggctgcacaccagaatgaatgaattgaattgaaagggaggagtgatggtggaaaaaaaaacaagtcaattcatttagactggtagaaccagaaccactgtgtagtacatccaaacggttaaaattccctggaagatgttacataatcctatcatggtgtttatttatggaaatctattttaaaaattttatgtaatactgcacagtctgtttgcatgatgccttgtacgtagtagcaactcagtaaatactttttgaatgaactagtatagtattttaattagctagtcttcatgtactggtacaaaagaacagtgtcatcttacagctgaagtcatagaggggaaatatcccactcaagatcatataacattccaggtactcaggatgaatggtttgaggactggtctgaattcttcaaaggtttcagctgtattaacattctccatctaataaactttatcttgtcattgca

SEQ ID NO: 66 - DNA, 7725 bp, Homo sapiens
agaatcttctgtaggcctttctcttgccttcttttattcacaactgatgacactgcatatcttcccctgttcttattgggagaaggccttgtgtgtcaccaagaggttctcagaagggacctgtcagtttttggttaaaagaacccggaaagagaaggactatgggggaactgatggcgttcctgttacctctcatcattgtgttaatggtgaagcacagcgattcccggacgcactctctgagatattttcgcctgggcgtttcggatcccatccatggggtccctgaatttatttcggttgggtacgtggactcgcaccctatcaccacatatgacagtgtcactcggcagaaggagccacgggccccatggatggcagagaacctcgcgcctgatcactgggagaggtacactcagctgctgaggggctggcagcagatgttcaaggtggaactgaagcgcctacagaggcactacaatcactcagataatgtggctcacaccatcaagcaggcatgggaggccaatcagcatgagttgctgtatcaaaagaattggctggaagaagaatgtattgcctggctaaagagattcctggagtatgggaaagacaccctacaaagaacagagcccccactggtcagagtaaatcgcaaagaaacttttccaggggttacagctctcttctgcaaagctcatggcttttaccccccagaaatttacatgacatggatgaaaaacggggaagaaattgtccaagaaattgattatggagacattcttcccagtggggatggaacctatcaggcgtgggcatcaattgagcttgatcctcagagcagcaacctttactcctgtcatgtggagcactgcggtgtccacatggttcttcaggtcccccaggaatcagaaactatccctcttgtgatgaaagctgtctctgggtccattgtccttgtcattgtgctggctggagttggtgttctagtctggagaagaaggccccgagagcaaaatggagccatctaccttccaacaccagatcgatgattgcagatccctcttttccagttctccttcctctaggagccatgttatcctctgtcccccatagagtcaagcctagtgcttgaaggtcctgacgacacccacaacatacatgagagtaatgggattgagcatttatggcagcaacagaggagccacaaaatgttctttgttctttggctccaaaaagactgtcagctttcagtctcttttgatggactgttttatcagagttgactttaaatacagcttgtctcatgacacaacgcttccctacattctatttgtcaatgatgatttgcaactagttggagattctcagagcaggaaggaatcttttcaaccagagcaggaactgtcttctgcaatgccttggacttgagcctccagcctccacttgaacaccatgtgaagggaacctcagtacttcataaaatggcctttctcattcatctttcatgggaacatttattgtacaagcgctttgaatatcatgggcaccatgactgtgaccctacaggtaggattggatcactccatgagagtagccggcaggtttctacaatggcctgggaatggactgattatttttatacattttctggcctgagagaaagccaaagtcccctgctgttcacagcaaccctgcctgggagcttggaatcttggtaatctgcccggttggatctatggaggtagtctcaccctttttgtcttttgtgggaaattaagagaaataattatcagacatatcatcacctccagtggaactacagagacctggacccagctgcactattttaatgtaaaaataacagtatggccaggtgcagtggctcacgcctgtaatcccatcactttgagcagccaaggcgggcggatcacgaggtcaggagattaagaccatcctggccaatatggtgaaaccctgtctctactaaaatacaaaaaattagctgggcatggtgttgcgtgcctgtagtcccagctacttgggaggctgagacaggggaattgcttgaacccgggaggcagagattgcagtgagccgagatcacgccactgcactccagcctggcgacagagtgagactctatctcaaaataataataataataataataataataataataataataacagtatatttggtgtcaggagagggctcaattctcatttctgcctttcctgtgctggctcatggtagctgggcatgacttgccttcctacataggttgtcttcatacatatgcactgggaatcaataaaagcccatggtgagaatgaacatccccttaatgttccttactatccccaacccctgaggcctcacctactgccctgccatgtggagctacttgccctggggctgccagtcacacattcctcggtcctacttctctgaccccgtttgactctgcacctgagccctaatgcttacttcagtgacctgaactttgacaagtggcttttgtcctgcacctcaggtttgacctctgctctcccttgaccttgactgtgacatttgacctttggctttaatcattacagcctcagataaaggtaccttcagcccgggcacagtggctcacgcctgtaatcctagcactttgggaggctgaggcaggcggattccctgagctcaggagttcaagaccagcctgggcaacacggtgaaaccctgtctctactaaaatacaaataattagctgggcatggtggcatgtgcctatagtcccagctacttgggaggctaaggcaggagaatcacttgaatctataaggcagaggtggcagtgagccgagatcacaccactgcactccagcctgggcaacggagcaagactctgtctccaaaaaaaaaaagaaagataccctcagtgtgccaggcctctaagagctcacctgccaggcttcctccttgctccactgtcccatgtaattccatatatgaagctaccactgtacatctctcttttccggtgcctgttgagttgcatagaagcacagttgtgtttattttgtttttagggttgccatgggcaatttccgtgccacttttaagcagtgttgcactgtgaagagaatgtaggcaagtttatttctggaatggtttcttcttacaatcagaatagttaggatgtaatatatttttgggtgggcatttaaagtgaaaaggtacatatttacatagacacaggtgataatgtatctatgtaaatgccttttgattctgcaactgcaggatactctcatcaaagacacagataaaaagcctctgtgtttccaaggccttgccctacacctaacacataatatgtccaaatggatgaagaggaggcaaggacaaggatgtgatgacaaaacattctgttatgcacttgtagcatttatgtttcttcctgggggattttataatactaaaagaatcataatataaagagatgattaaaaaaaaaatactgccgggcacggtggctcatgcctgtaatcccagcattttgggaggccgaggtgggcagatcacctgaggtcgggagttcgagaccagcctgaccaacatggagaaaccctgtctctaccaaacatacaaaattagccggggatggtggcgcatgcctataatcccagctactcgggagtctgaggcagaagaaccgcttgaacccgggaggcagaggttgtggtgagccgagatcgcgccatcgcactctagcctgggcaacaagagtgaaactccatctcaaaaaaataaaaataaaataagtaagtaatacctaaaattctgcaaccttcattttactatagatggttgaagattatattacttcttaattgttttagccttgttattgcttcattacttcatggttgttgagtacagatgctcagtaatcataacctatgaaatatttgacaccatgatctaaacattaaaaacaaataactgtgctattgccacagctatgttttggctttgaattttctttactgaatattttggatcaagaacactagatgagaaacctgttcaactctgttcttttttttttttttaactccactgtatttattacctgtttttgttttttttgtttgtttgtttttgatgtgcatatagaccaagatgtggtaaatttaaatggcagatgtttttgatgtggtacatttaagggagagaaagcagtttaaagagcagggtgaaaaatccaacaagactccatcgagagtttctgagctctcccatcaggggccagtcctcctttcctctctcctcttactcccatgatttccaagttgtgatcctttccttatttctgaggaatgacttggtttctcctcttctttttttggcctgagagaagatgtttttgcacttgtagctatgaggaacagattgtccactagggaggccagctgatcattttctgccagagtcacacagagcagtcacaccttattttgaaaaccactgtctggggtctttgtcctcacatatgcaggtctagtgtccccacaaagtgatcagatggatatataaagtggagtgccaatgtattaatttactgtgagaaacacaattgctaagtgggtcagatatctgtctcagctggtcagtacaccttccagcaggaaaatctacataagaacaactaaatcacaatctgtagagtgcttgatgaccccagaattggtgcaaggggacacattcttgcttgttagcacctgctctctggagtttgctattttctcacacacagtgtattagttcacagaatgttctccaaggaggacagggggctttgcccatagccatgtgctgtgggcagcagagctaggaagaagcacaggcatctcccagcccaggtgtttcccacttaactgcattgcccttttcatcttttttttttccccaatagcttcaggacattcagtacattgtgctttttagaggttgatgattccactgcctgagctgccttcacctctctttctttggaaattgccatctttgagcattgtatgtctctgtaacatctctgcatctccttttcactctggcctccctttctccattgtccttctagcttctggttgccccaaaccccacagactgtgtaacaaaacccaaaacctattggtttaaaacaatacccattttattttctttcatagtttctatgggtcaggaatttggatatggcttgggtaagcagttctggcttctcatggagttggaggcaagtggtggctggaacagaaatggggcagccaggggtggtggccaggcatcagctacatctcctccatgtagtctcaggaactctccatgtaatctctctgtgtgggttgggcttcctcacaacatggtggcctcagggcagtcactgcttacatggcagctagcttccctcagagtgagtatcccaagagatcacagtcaaagtgcatagcatttatataatctaatcttggaagtcacaaaatgtcattcttgtgatactctcattggtgaagaagtcataaaatcctgctcaggttcaaaaagagggtgtatagaacccaacactcaataggaagattgtcagagttacattgtaagaagagcatgtagttgggagatatcattgtggccattttgggaaagatgcaacatgtcacaatgtcatgttctccatcgtctccccgttccaccttgtactggtttccaagggtagtcgtttaaaagtaccacaaaaactgggtggcttggaacaacagaaatttattgtttcacagttctggaggccagaagttcaaaatgaagtgttggcagaaacatgctgcctctaaagggactgggaaaggatctgttccaggcttccctcctatcttctggttgttccttgccttctggctgcgtaactctagtcttcatttggtgttctccctgcatgcatggctttgtgtccaaatttccttttttcatgaggccatcagtcatactggattagggacccactctactactgcaggatgacctcaccttcccaaattacatctgcaacaaccctatttccaaagaaggccacattctgaggtactgggggttataacttcaacatgaattttttggaggaaacaattcaactcctaacacatctctacccaacctctgtaggttccctcaatccaccaaaattttttggctccactggattatctagcagttaggaaaccaagatcattaaatgaattcaccgcaactacagtgagactgactaccttagcttacctctgtgaaaggagttaagccaaaggaatctgtggaattttggagagtttgggagcatttgggggcaggaggcaaatgttcttcctttaaatcacaacacttagttctcttccatttataagactcacccctccatcccaacccctgcaccacaggacaaggaagtgttcttggtcttcaactttcatccctgatggtgaaagcagttgctcctgacctatttgcccaccagcttctcctctggagcctgaggcttctgatgcctgcctggctggttctcagtaagaaggtcaagttcaaccagaggggagatgctgatgcctttcagtacttaaatatgagttcagaccctggggcctggacataagatttggggtcccctggatataagatttctgaaaacactcagactgtggagacccctgctgagggagaagccccaaactgtggcttcaggggaatgcaccaaggctctcattgaggccaccttctccaacaagctcccctcctgcttccccatggctggcatggctgaggaaaaaggacactgagcacagcccgtgcatgagcggcttgccatgcaacaggataaaacccataatgccactcagcaagccttggttgtaaatctagtttgattacatttgtaatcaaatgatggccatttgttctgtttctggtttgtgaaccaactgaagacataagcagggcctcagctaacccacaaatagcacatgtgtgcaaactggaaaaatgaacccttcttctgggaggacgccagcccaggccaggtcacccggcttggccagcagaacacagagtagattttggtcccgtttgttccccagtggggtatctatccttgtgcagggcacaagcctacatggtggctctggtcatatcattagaaaatagacagaaatgggctgcacaccagaatgaatgaattgaattgaaagggaggagtgatggtggaaaaaaaaacaagtcaattcatttagactggtagaaccagaaccactgtgtagtacatccaaacggttaaaattccctggaagatgttacataatcctatcatggtgtttatttatggaaatctattttaaaaattttatgtaatactgcacagtctgtttgcatgatgccttgtacgtagtagcaactcagtaaatactttttgaatgaactagtatagtattttaattagctagtcttcatgtactggtacaaaagaacagtgtcatcttacagctgaagtcatagaggggaaatatcccactcaagatcatataacattccaggtactcaggatgaatggtttgaggactggtctgaattcttcaaaggtttcagctgtattaacattctccatctaataaactttatcttgtcattgca

SEQ ID NO: 67 - DNA, 1412 bp, Homo sapiens
atttgtccctgcctacctagccaatctgtccctgtttgggacactggactcccgtgagctggaaggaacagatttaatatctaggggctgggtatccccacatcactcatttggggggtcaagggacccgggcaatatagtattctgctcagtgtctggagatcatctacccaggctggggcttctgggacaggcgaggacccacggaccctggaagagctggtccaggggactgaactcccggcatctttacagagcagagcatgatcacattcctgccgctgctgctggggctcagcctgggctgcacaggagcaggtggcttcgtggcccatgtggaaagcacctgtctgttggatgatgctgggactccaaaggatttcacatactgcatctccttcaacaaggatctgctgacctgctgggatccagaggagaataagatggccccttgcgaatttggggtgctgaatagcttggcgaatgtcctctcacagcacctcaaccaaaaagacaccctgatgcagcgcttgcgcaatgggcttcagaattgtgccacacacacccagcccttctggggatcactgaccaacaggacacggccaccatctgtgcaagtagccaaaaccactccttttaacacgagggagcctgtgatgctggcctgctatgtgtggggcttctatccagcagaagtgactatcacgtggaggaagaacgggaagcttgtcatgcctcacagcagtgcgcacaagactgcccagcccaatggagactggacataccagaccctctcccatttagccttaaccccctcttacggggacacttacacctgtgtggtagagcacactggggctcctgagcccatccttcgggactggacacctgggctgtcccccatgcagaccctgaaggtttctgtgtctgcagtgactctgggcctgggcctcatcatcttctctcttggtgtgatcagctggcggagagctggccactctagttacactcctcttcctgggtccaattattcagaaggatggcacatttcctagaggcagaatcctacaacttccactccaagtgagaaggagattcaaactcaatgatgctaccatgcctctccaacatcttcaaccccctgacattatcttggatcctatggtttctccatccaattctttgaatttcccagtctcccctatgtaaaacttagcaacttgggggacctcattcctgggactatgctgtaaccaaattattgtccaaggctatatttctgggatgaatataatctgaggaagggagttaaagaccctcctggggctctcagtgtgccatagaggacagcaactggtgattgtttcagagaaataaactttggtggaaatattgttaaaaaaaaaaaaaaa

SEQ ID NO: 68 - DNA, 7479 bp, Homo sapiens
agaatcttctgtaggcctttctcttgccttcttttattcacaactgatgacactgcatatcttcccctgttcttattgggagaaggccttgtgtgtcaccaagaggttctcagaagggacctgtcagtttttggttaaaagaacccggaaagagaaggactatgggggaactgatggcgttcctgttacctctcatcattgtgttaatggtgaagcacagcgattcccggacgcactctctgagatattttcgcctgggcgtttcggatcccatccatggggtccctgaatttatttcggttgggtacgtggactcgcaccctatcaccacatatgacagtgtcactcggcagaaggagccacgggccccatggatggcagagaacctcgcgcctgatcactgggagaggtacactcagctgctgaggggctggcagcagatgttcaaggtggaactgaagcgcctacagaggcactacaatcactcagggtctcacacttaccagagaatgattggctgtgagctgctggaggatggaagcaccacaggatttctgcagtatgcatatgacgggcaggatttcctgatcttcaataaagacaccctctcctggctggctgtagataatgtggctcacaccatcaagcaggcatgggaggccaatcagcatgagttgctgtatcaaaagaattggctggaagaagaatgtattgcctggctaaagagattcctggagtatgggaaagacaccctacaaagaacagagcaaaatggagccatctaccttccaacaccagatcgatgattgcagatccctcttttccagttctccttcctctaggagccatgttatcctctgtcccccatagagtcaagcctagtgcttgaaggtcctgacgacacccacaacatacatgagagtaatgggattgagcatttatggcagcaacagaggagccacaaaatgttctttgttctttggctccaaaaagactgtcagctttcagtctcttttgatggactgttttatcagagttgactttaaatacagcttgtctcatgacacaacgcttccctacattctatttgtcaatgatgatttgcaactagttggagattctcagagcaggaaggaatcttttcaaccagagcaggaactgtcttctgcaatgccttggacttgagcctccagcctccacttgaacaccatgtgaagggaacctcagtacttcataaaatggcctttctcattcatctttcatgggaacatttattgtacaagcgctttgaatatcatgggcaccatgactgtgaccctacaggtaggattggatcactccatgagagtagccggcaggtttctacaatggcctgggaatggactgattatttttatacattttctggcctgagagaaagccaaagtcccctgctgttcacagcaaccctgcctgggagcttggaatcttggtaatctgcccggttggatctatggaggtagtctcaccctttttgtcttttgtgggaaattaagagaaataattatcagacatatcatcacctccagtggaactacagagacctggacccagctgcactattttaatgtaaaaataacagtatggccaggtgcagtggctcacgcctgtaatcccatcactttgagcagccaaggcgggcggatcacgaggtcaggagattaagaccatcctggccaatatggtgaaaccctgtctctactaaaatacaaaaaattagctgggcatggtgttgcgtgcctgtagtcccagctacttgggaggctgagacaggggaattgcttgaacccgggaggcagagattgcagtgagccgagatcacgccactgcactccagcctggcgacagagtgagactctatctcaaaataataataataataataataataataataataataataacagtatatttggtgtcaggagagggctcaattctcatttctgcctttcctgtgctggctcatggtagctgggcatgacttgccttcctacataggttgtcttcatacatatgcactgggaatcaataaaagcccatggtgagaatgaacatccccttaatgttccttactatccccaacccctgaggcctcacctactgccctgccatgtggagctacttgccctggggctgccagtcacacattcctcggtcctacttctctgaccccgtttgactctgcacctgagccctaatgcttacttcagtgacctgaactttgacaagtggcttttgtcctgcacctcaggtttgacctctgctctcccttgaccttgactgtgacatttgacctttggctttaatcattacagcctcagataaaggtaccttcagcccgggcacagtggctcacgcctgtaatcctagcactttgggaggctgaggcaggcggattccctgagctcaggagttcaagaccagcctgggcaacacggtgaaaccctgtctctactaaaatacaaataattagctgggcatggtggcatgtgcctatagtcccagctacttgggaggctaaggcaggagaatcacttgaatctataaggcagaggtggcagtgagccgagatcacaccactgcactccagcctgggcaacggagcaagactctgtctccaaaaaaaaaaagaaagataccctcagtgtgccaggcctctaagagctcacctgccaggcttcctccttgctccactgtcccatgtaattccatatatgaagctaccactgtacatctctcttttccggtgcctgttgagttgcatagaagcacagttgtgtttattttgtttttagggttgccatgggcaatttccgtgccacttttaagcagtgttgcactgtgaagagaatgtaggcaagtttatttctggaatggtttcttcttacaatcagaatagttaggatgtaatatatttttgggtgggcatttaaagtgaaaaggtacatatttacatagacacaggtgataatgtatctatgtaaatgccttttgattctgcaactgcaggatactctcatcaaagacacagataaaaagcctctgtgtttccaaggccttgccctacacctaacacataatatgtccaaatggatgaagaggaggcaaggacaaggatgtgatgacaaaacattctgttatgcacttgtagcatttatgtttcttcctgggggattttataatactaaaagaatcataatataaagagatgattaaaaaaaaaatactgccgggcacggtggctcatgcctgtaatcccagcattttgggaggccgaggtgggcagatcacctgaggtcgggagttcgagaccagcctgaccaacatggagaaaccctgtctctaccaaacatacaaaattagccggggatggtggcgcatgcctataatcccagctactcgggagtctgaggcagaagaaccgcttgaacccgggaggcagaggttgtggtgagccgagatcgcgccatcgcactctagcctgggcaacaagagtgaaactccatctcaaaaaaataaaaataaaataagtaagtaatacctaaaattctgcaaccttcattttactatagatggttgaagattatattacttcttaattgttttagccttgttattgcttcattacttcatggttgttgagtacagatgctcagtaatcataacctatgaaatatttgacaccatgatctaaacattaaaaacaaataactgtgctattgccacagctatgttttggctttgaattttctttactgaatattttggatcaagaacactagatgagaaacctgttcaactctgttcttttttttttttttaactccactgtatttattacctgtttttgttttttttgtttgtttgtttttgatgtgcatatagaccaagatgtggtaaatttaaatggcagatgtttttgatgtggtacatttaagggagagaaagcagtttaaagagcagggtgaaaaatccaacaagactccatcgagagtttctgagctctcccatcaggggccagtcctcctttcctctctcctcttactcccatgatttccaagttgtgatcctttccttatttctgaggaatgacttggtttctcctcttctttttttggcctgagagaagatgtttttgcacttgtagctatgaggaacagattgtccactagggaggccagctgatcattttctgccagagtcacacagagcagtcacaccttattttgaaaaccactgtctggggtctttgtcctcacatatgcaggtctagtgtccccacaaagtgatcagatggatatataaagtggagtgccaatgtattaatttactgtgagaaacacaattgctaagtgggtcagatatctgtctcagctggtcagtacaccttccagcaggaaaatctacataagaacaactaaatcacaatctgtagagtgcttgatgaccccagaattggtgcaaggggacacattcttgcttgttagcacctgctctctggagtttgctattttctcacacacagtgtattagttcacagaatgttctccaaggaggacagggggctttgcccatagccatgtgctgtgggcagcagagctaggaagaagcacaggcatctcccagcccaggtgtttcccacttaactgcattgcccttttcatcttttttttttccccaatagcttcaggacattcagtacattgtgctttttagaggttgatgattccactgcctgagctgccttcacctctctttctttggaaattgccatctttgagcattgtatgtctctgtaacatctctgcatctccttttcactctggcctccctttctccattgtccttctagcttctggttgccccaaaccccacagactgtgtaacaaaacccaaaacctattggtttaaaacaatacccattttattttctttcatagtttctatgggtcaggaatttggatatggcttgggtaagcagttctggcttctcatggagttggaggcaagtggtggctggaacagaaatggggcagccaggggtggtggccaggcatcagctacatctcctccatgtagtctcaggaactctccatgtaatctctctgtgtgggttgggcttcctcacaacatggtggcctcagggcagtcactgcttacatggcagctagcttccctcagagtgagtatcccaagagatcacagtcaaagtgcatagcatttatataatctaatcttggaagtcacaaaatgtcattcttgtgatactctcattggtgaagaagtcataaaatcctgctcaggttcaaaaagagggtgtatagaacccaacactcaataggaagattgtcagagttacattgtaagaagagcatgtagttgggagatatcattgtggccattttgggaaagatgcaacatgtcacaatgtcatgttctccatcgtctccccgttccaccttgtactggtttccaagggtagtcgtttaaaagtaccacaaaaactgggtggcttggaacaacagaaatttattgtttcacagttctggaggccagaagttcaaaatgaagtgttggcagaaacatgctgcctctaaagggactgggaaaggatctgttccaggcttccctcctatcttctggttgttccttgccttctggctgcgtaactctagtcttcatttggtgttctccctgcatgcatggctttgtgtccaaatttccttttttcatgaggccatcagtcatactggattagggacccactctactactgcaggatgacctcaccttcccaaattacatctgcaacaaccctatttccaaagaaggccacattctgaggtactgggggttataacttcaacatgaattttttggaggaaacaattcaactcctaacacatctctacccaacctctgtaggttccctcaatccaccaaaattttttggctccactggattatctagcagttaggaaaccaagatcattaaatgaattcaccgcaactacagtgagactgactaccttagcttacctctgtgaaaggagttaagccaaaggaatctgtggaattttggagagtttgggagcatttgggggcaggaggcaaatgttcttcctttaaatcacaacacttagttctcttccatttataagactcacccctccatcccaacccctgcaccacaggacaaggaagtgttcttggtcttcaactttcatccctgatggtgaaagcagttgctcctgacctatttgcccaccagcttctcctctggagcctgaggcttctgatgcctgcctggctggttctcagtaagaaggtcaagttcaaccagaggggagatgctgatgcctttcagtacttaaatatgagttcagaccctggggcctggacataagatttggggtcccctggatataagatttctgaaaacactcagactgtggagacccctgctgagggagaagccccaaactgtggcttcaggggaatgcaccaaggctctcattgaggccaccttctccaacaagctcccctcctgcttccccatggctggcatggctgaggaaaaaggacactgagcacagcccgtgcatgagcggcttgccatgcaacaggataaaacccataatgccactcagcaagccttggttgtaaatctagtttgattacatttgtaatcaaatgatggccatttgttctgtttctggtttgtgaaccaactgaagacataagcagggcctcagctaacccacaaatagcacatgtgtgcaaactggaaaaatgaacccttcttctgggaggacgccagcccaggccaggtcacccggcttggccagcagaacacagagtagattttggtcccgtttgttccccagtggggtatctatccttgtgcagggcacaagcctacatggtggctctggtcatatcattagaaaatagacagaaatgggctgcacaccagaatgaatgaattgaattgaaagggaggagtgatggtggaaaaaaaaacaagtcaattcatttagactggtagaaccagaaccactgtgtagtacatccaaacggttaaaattccctggaagatgttacataatcctatcatggtgtttatttatggaaatctattttaaaaattttatgtaatactgcacagtctgtttgcatgatgccttgtacgtagtagcaactcagtaaatactttttgaatgaactagtatagtattttaattagctagtcttcatgtactggtacaaaagaacagtgtcatcttacagctgaagtcatagaggggaaatatcccactcaagatcatataacattccaggtactcaggatgaatggtttgaggactggtctgaattcttcaaaggtttcagctgtattaacattctccatctaataaactttatcttgtcattgca

SEQ ID NO: 69 - DNA, 7860 bp, Homo sapiens
agaatcttctgtaggcctttctcttgccttcttttattcacaactgatgacactgcatatcttcccctgttcttattgggagaaggccttgtgtgtcaccaagaggttctcagaagggacctgtcagtttttggttaaaagaacccggaaagagaaggactatgggggaactgatggcgttcctgttacctctcatcattgtgttaatggtgaagcacagcgattcccggacgcactctctgagatattttcgcctgggcgtttcggatcccatccatggggtccctgaatttatttcggttgggtacgtggactcgcaccctatcaccacatatgacagtgtcactcggcagaaggagccacgggccccatggatggcagagaacctcgcgcctgatcactgggagaggtacactcagctgctgaggggctggcagcagatgttcaaggtggaactgaagcgcctacagaggcactacaatcactcagggtctcacacttaccagagaatgattggctgtgagctgctggaggatggaagcaccacaggatttctgcagtatgcatatgacgggcaggatttcctgatcttcaataaagacaccctctcctggctggctgtagataatgtggctcacaccatcaagcaggcatgggaggccaatcagcatgagttgctgtatcaaaagaattggctggaagaagaatgtattgcctggctaaagagattcctggagtatgggaaagacaccctacaaagaacagagcccccactggtcagagtaaatcgcaaagaaacttttccaggggttacagctctcttctgcaaagctcatggcttttaccccccagaaatttacatgacatggatgaaaaacggggaagaaattgtccaagaaattgattatggagacattcttcccagtggggatggaacctatcaggcgtgggcatcaattgagcttgatcctcagagcagcaacctttactcctgtcatgtggagcactgcggtgtccacatggttcttcaggtcccccaggaatcagaaactatccctcttgtgatgaaagctgtctctgggtccattgtccttgtcattgtgctggctggagttggtgttctagtctggagaagaaggccccgagagcaaaatggagccatctaccttccaacaccagatcgatgattgcagatccctcttttccagttctccttcctctaggagccatgttatcctctgtcccccatagagtcaagcctagtgcttgaaggtcctgacgacacccacaacatacatgagagtaatgggattgagcatttatggcagcaacagaggagccacaaaatgttctttgttctttggctccaaaaagactgtcagctttcagtctcttttgatggactgttttatcagagttgactttaaatacagcttgtctcatgacacaacgcttccctacattctatttgtcaatgatgatttgcaactagttggagattctcagagcaggaaggaatcttttcaaccagagcaggaactgtcttctgcaatgccttggacttgagcctccagcctccacttgaacaccatgtgaagggaacctcagtacttcataaaatggcctttctcattcatctttcatgggaacatttattgtacaagcgctttgaatatcatgggcaccatgactgtgaccctacaggtaggattggatcactccatgagagtagccggcaggtttctacaatggcctgggaatggactgattatttttatacattttctggcctgagagaaagccaaagtcccctgctgttcacagcaaccctgcctgggagcttggaatcttggtaatctgcccggttggatctatggaggtagtctcaccctttttgtcttttgtgggaaattaagagaaataattatcagacatatcatcacctccagtggaactacagagacctggacccagctgcactattttaatgtaaaaataacagtatggccaggtgcagtggctcacgcctgtaatcccatcactttgagcagccaaggcgggcggatcacgaggtcaggagattaagaccatcctggccaatatggtgaaaccctgtctctactaaaatacaaaaaattagctgggcatggtgttgcgtgcctgtagtcccagctacttgggaggctgagacaggggaattgcttgaacccgggaggcagagattgcagtgagccgagatcacgccactgcactccagcctggcgacagagtgagactctatctcaaaataataataataataataataataataataataataataacagtatatttggtgtcaggagagggctcaattctcatttctgcctttcctgtgctggctcatggtagctgggcatgacttgccttcctacataggttgtcttcatacatatgcactgggaatcaataaaagcccatggtgagaatgaacatccccttaatgttccttactatccccaacccctgaggcctcacctactgccctgccatgtggagctacttgccctggggctgccagtcacacattcctcggtcctacttctctgaccccgtttgactctgcacctgagccctaatgcttacttcagtgacctgaactttgacaagtggcttttgtcctgcacctcaggtttgacctctgctctcccttgaccttgactgtgacatttgacctttggctttaatcattacagcctcagataaaggtaccttcagcccgggcacagtggctcacgcctgtaatcctagcactttgggaggctgaggcaggcggattccctgagctcaggagttcaagaccagcctgggcaacacggtgaaaccctgtctctactaaaatacaaataattagctgggcatggtggcatgtgcctatagtcccagctacttgggaggctaaggcaggagaatcacttgaatctataaggcagaggtggcagtgagccgagatcacaccactgcactccagcctgggcaacggagcaagactctgtctccaaaaaaaaaaagaaagataccctcagtgtgccaggcctctaagagctcacctgccaggcttcctccttgctccactgtcccatgtaattccatatatgaagctaccactgtacatctctcttttccggtgcctgttgagttgcatagaagcacagttgtgtttattttgtttttagggttgccatgggcaatttccgtgccacttttaagcagtgttgcactgtgaagagaatgtaggcaagtttatttctggaatggtttcttcttacaatcagaatagttaggatgtaatatatttttgggtgggcatttaaagtgaaaaggtacatatttacatagacacaggtgataatgtatctatgtaaatgccttttgattctgcaactgcaggatactctcatcaaagacacagataaaaagcctctgtgtttccaaggccttgccctacacctaacacataatatgtccaaatggatgaagaggaggcaaggacaaggatgtgatgacaaaacattctgttatgcacttgtagcatttatgtttcttcctgggggattttataatactaaaagaatcataatataaagagatgattaaaaaaaaaatactgccgggcacggtggctcatgcctgtaatcccagcattttgggaggccgaggtgggcagatcacctgaggtcgggagttcgagaccagcctgaccaacatggagaaaccctgtctctaccaaacatacaaaattagccggggatggtggcgcatgcctataatcccagctactcgggagtctgaggcagaagaaccgcttgaacccgggaggcagaggttgtggtgagccgagatcgcgccatcgcactctagcctgggcaacaagagtgaaactccatctcaaaaaaataaaaataaaataagtaagtaatacctaaaattctgcaaccttcattttactatagatggttgaagattatattacttcttaattgttttagccttgttattgcttcattacttcatggttgttgagtacagatgctcagtaatcataacctatgaaatatttgacaccatgatctaaacattaaaaacaaataactgtgctattgccacagctatgttttggctttgaattttctttactgaatattttggatcaagaacactagatgagaaacctgttcaactctgttcttttttttttttttaactccactgtatttattacctgtttttgttttttttgtttgtttgtttttgatgtgcatatagaccaagatgtggtaaatttaaatggcagatgtttttgatgtggtacatttaagggagagaaagcagtttaaagagcagggtgaaaaatccaacaagactccatcgagagtttctgagctctcccatcaggggccagtcctcctttcctctctcctcttactcccatgatttccaagttgtgatcctttccttatttctgaggaatgacttggtttctcctcttctttttttggcctgagagaagatgtttttgcacttgtagctatgaggaacagattgtccactagggaggccagctgatcattttctgccagagtcacacagagcagtcacaccttattttgaaaaccactgtctggggtctttgtcctcacatatgcaggtctagtgtccccacaaagtgatcagatggatatataaagtggagtgccaatgtattaatttactgtgagaaacacaattgctaagtgggtcagatatctgtctcagctggtcagtacaccttccagcaggaaaatctacataagaacaactaaatcacaatctgtagagtgcttgatgaccccagaattggtgcaaggggacacattcttgcttgttagcacctgctctctggagtttgctattttctcacacacagtgtattagttcacagaatgttctccaaggaggacagggggctttgcccatagccatgtgctgtgggcagcagagctaggaagaagcacaggcatctcccagcccaggtgtttcccacttaactgcattgcccttttcatcttttttttttccccaatagcttcaggacattcagtacattgtgctttttagaggttgatgattccactgcctgagctgccttcacctctctttctttggaaattgccatctttgagcattgtatgtctctgtaacatctctgcatctccttttcactctggcctccctttctccattgtccttctagcttctggttgccccaaaccccacagactgtgtaacaaaacccaaaacctattggtttaaaacaatacccattttattttctttcatagtttctatgggtcaggaatttggatatggcttgggtaagcagttctggcttctcatggagttggaggcaagtggtggctggaacagaaatggggcagccaggggtggtggccaggcatcagctacatctcctccatgtagtctcaggaactctccatgtaatctctctgtgtgggttgggcttcctcacaacatggtggcctcagggcagtcactgcttacatggcagctagcttccctcagagtgagtatcccaagagatcacagtcaaagtgcatagcatttatataatctaatcttggaagtcacaaaatgtcattcttgtgatactctcattggtgaagaagtcataaaatcctgctcaggttcaaaaagagggtgtatagaacccaacactcaataggaagattgtcagagttacattgtaagaagagcatgtagttgggagatatcattgtggccattttgggaaagatgcaacatgtcacaatgtcatgttctccatcgtctccccgttccaccttgtactggtttccaagggtagtcgtttaaaagtaccacaaaaactgggtggcttggaacaacagaaatttattgtttcacagttctggaggccagaagttcaaaatgaagtgttggcagaaacatgctgcctctaaagggactgggaaaggatctgttccaggcttccctcctatcttctggttgttccttgccttctggctgcgtaactctagtcttcatttggtgttctccctgcatgcatggctttgtgtccaaatttccttttttcatgaggccatcagtcatactggattagggacccactctactactgcaggatgacctcaccttcccaaattacatctgcaacaaccctatttccaaagaaggccacattctgaggtactgggggttataacttcaacatgaattttttggaggaaacaattcaactcctaacacatctctacccaacctctgtaggttccctcaatccaccaaaattttttggctccactggattatctagcagttaggaaaccaagatcattaaatgaattcaccgcaactacagtgagactgactaccttagcttacctctgtgaaaggagttaagccaaaggaatctgtggaattttggagagtttgggagcatttgggggcaggaggcaaatgttcttcctttaaatcacaacacttagttctcttccatttataagactcacccctccatcccaacccctgcaccacaggacaaggaagtgttcttggtcttcaactttcatccctgatggtgaaagcagttgctcctgacctatttgcccaccagcttctcctctggagcctgaggcttctgatgcctgcctggctggttctcagtaagaaggtcaagttcaaccagaggggagatgctgatgcctttcagtacttaaatatgagttcagaccctggggcctggacataagatttggggtcccctggatataagatttctgaaaacactcagactgtggagacccctgctgagggagaagccccaaactgtggcttcaggggaatgcaccaaggctctcattgaggccaccttctccaacaagctcccctcctgcttccccatggctggcatggctgaggaaaaaggacactgagcacagcccgtgcatgagcggcttgccatgcaacaggataaaacccataatgccactcagcaagccttggttgtaaatctagtttgattacatttgtaatcaaatgatggccatttgttctgtttctggtttgtgaaccaactgaagacataagcagggcctcagctaacccacaaatagcacatgtgtgcaaactggaaaaatgaacccttcttctgggaggacgccagcccaggccaggtcacccggcttggccagcagaacacagagtagattttggtcccgtttgttccccagtggggtatctatccttgtgcagggcacaagcctacatggtggctctggtcatatcattagaaaatagacagaaatgggctgcacaccagaatgaatgaattgaattgaaagggaggagtgatggtggaaaaaaaaacaagtcaattcatttagactggtagaaccagaaccactgtgtagtacatccaaacggttaaaattccctggaagatgttacataatcctatcatggtgtttatttatggaaatctattttaaaaattttatgtaatactgcacagtctgtttgcatgatgccttgtacgtagtagcaactcagtaaatactttttgaatgaactagtatagtattttaattagctagtcttcatgtactggtacaaaagaacagtgtcatcttacagctgaagtcatagaggggaaatatcccactcaagatcatataacattccaggtactcaggatgaatggtttgaggactggtctgaattcttcaaaggtttcagctgtattaacattctccatctaataaactttatcttgtcattgca

SEQ ID NO: 70 - DNA, 1193 bp, Homo sapiens
ggggggccatagttctccctgattgagacttgcctgctgctgtgaccactggtcttgtcctcttctccagcatggtgtgtctgaagctccctggaggctcctgtatggcagcgctgacagtgacattgacggtgctgagctccccactggctttggctggggacacccaaccacgtttcttggagcaggctaagtgtgagtgtcatttcctcaatgggacggagcgagtgtggaacctgatcagatacatctataaccaagaggagtacgcgcgctacaacagtgacctgggggagtaccaggcggtgacggagctggggcggcctgacgctgagtactggaacagccagaaggacctcctggagcggaggcgggccgaggtggacacctactgcagatacaactacggggttgtggagagcttcacagtgcagcggcgagtccaacctaaggtgactgtgtatccttcaaagacccagcccctgcagcaccacaacctcctggtctgctctgtgaatggtttctatccaggcagcattgaagtcaggtggttccggaacggccaggaagagaaggctggggtggtgtccacaggcctgatccagaatggagactggaccttccagaccctggtgatgctggaaacagttcctcggagtggagaggtttacacctgccaagtggagcatccaagcatgatgagccctctcacggtgcaatggagtgcacggtctgaatctgcacagagcaagatgctgagtggagtcgggggctttgtgctgggcctgctcttccttgggacagggctgttcatctacttcaggaatcagaaaggacactctggacttcagccaacaggactcttgagctgaagtgcagatgaccacattcaaggaagaaccttctgccccagctttgcaagatgaaaagctttcccacttggctcttattcttccacaagagctttgtcaggaccaggttgttactggttcagcaactctgcagaaaatgtcctcccttgtggcttccttagctcctgttcttggcctgaagcctcacagctttgatggcagtgcctcatcttcaacttttgtgcttccctttacctaaactgtcctgcctcccgtgcatctgtactccccttgtgccacacattgcattattaaatgtttctcaaacatggagttaaaaaa

SEQ ID NO: 71 - DNA, 1542 bp, Homo sapiens
acaattactctacagctcagaacaccaactgctgaggctgccttgggaagaggatgatcctaaacaaagctctgctgctgggggccctcgctctgaccaccgtgatgagcccctgtggaggtgaagacattgtggctgaccacgttgcctcttgtggtgtaaacttgtaccagttttacggtccctctggccagtacacccatgaatttgatggagatgagcagttctacgtggacctggagaggaaggagactgcctggcggtggcctgagttcagcaaatttggaggttttgacccgcagggtgcactgagaaacatggctgtggcaaaacacaacttgaacatcatgattaaacgctacaactctaccgctgctaccaatgaggttcctgaggtcacagtgttttccaagtctcccgtgacactgggtcagcccaacaccctcatttgtcttgtggacaacatctttcctcctgtggtcaacatcacatggctgagcaatgggcagtcagtcacagaaggtgtttctgagaccagcttcctctccaagagtgatcattccttcttcaagatcagttacctcaccttcctcccttctgctgatgagatttatgactgcaaggtggagcactggggcctggaccagcctcttctgaaacactgggagcctgagattccagcccctatgtcagagctcacagagactgtggtctgtgccctggggttgtctgtgggcctcatgggcattgtggtgggcactgtcttcatcatccaaggcctgcgttcagttggtgcttccagacaccaagggccattgtgaatcccatcctggaagggaaggtgcatcgccatctacaggagcagaagaatggacttgctaaatgacctagcactattctctggcccgatttatcatatcccttttctcctccaaatatttctcctctcaccttttctctgggacttaagctgctatatcccctcagagctcacaaatgcctttacattctttccctgacctcctgattttttttttcttttctcaaatgttacctacaaagacatgcctggggtaagccacccggctacctaattcctcagtaacctccatctaaaatctccaaggaagcaataaattccttttatgagatctatgtcaaatttttccatctttcatccagggctgactgaaactatggctaataattggggtactcttatgtttcaatccaatttaacctcatttcccagatcatttttcatgtccagtaacacagaagccaccaagtacagtatagcctgataatatgttgatttcttagctgacattaatatttcttgcttccttgtgttcccacccttggcactgccacccacccctcaattcaggcaacaatgaaattaatggataccgtctgcccttggcccagaattgttatagcaaaaattttagaaccaaaaaataagtctgtactaatttcaatgtggcttttaaaagtatgacagagaaataagttaggataaaggaaatttgaatctca

SEQ ID NO: 72 - DNA, 1656 bp, Homo sapiens
tttttattctttctgccaggtacatcagatccatcaggtccgagctgtgttgactaccactgcttttcccttcgtctcagttatgtcttggaagaaggctttgcggatccccggagaccttcgggtagcaactgtcaccttgatgctggcgatgctgagctccctactggctgagggcagagactctcccgaggatttcgtgttccagtttaagggcatgtgctacttcaccaacgggacggagcgcgtgcgtcttgtgaccagatacatctataaccgagaggagtacgcgcgcttcgacagcgacgtgggggtgtaccgcgcggtgacgccgcaggggcggcctgatgccgagtactggaacagccagaaggaagtcctggaggggacccgggcggagttggacacggtgtgcagacacaactacgaggtggcgttccgcgggatcttgcagaggagagtggagcccacagtgaccatctccccatccaggacagaggccctcaaccaccacaacctgctggtctgctcggtgacagatttctatccaggccagatcaaagtccggtggtttcggaatgatcaggaggagacagccggcgttgtgtccaccccccttattaggaatggtgactggactttccagatcctggtgatgctggaaatgactccccagcgtggagatgtctacacctgccacgtggagcaccccagcctccagagccccatcaccgtggagtggcgggctcagtctgaatctgcccagagcaagatgctgagtggcgttggaggcttcgtgctggggctgatcttccttgggctgggccttatcatccgtcaaaggagtcagaaagggcttctgcactgactcctgagactattttaactaggattggttatcactcttctgtgatgcctgcttatgcctgcccagaattcccagctgcctgtgtcagcttgtccccctgagatcaaagtcctacagtggctgtcacgcagccaccaggtcatctcctttcatccccaccccaaggcgctggctgtgactctgcttcctgcactgacccagagcctctgcctgtgcatggccagctgcgtctactcaggtcccaaggggtttctgtttctattctttcctcagactgctcaagagaagcacatgaaaaacattacctgactttagagcttttttacataattaaacatgatcctgagttatctgtattctgaactttcttaattgagaagaggcaggaaatcactgcagaatgaaggaacatcccttgaggtgacccagcaaacctgtggccagaaggaggattgtaccttgaaaagacactgaaagcattttggggtgtgaagtaagggtgggcagaggaggtagaaaataattcaattgtcgcatcattcatggttctttaatactgatgctcagtgcattggccttagaatatcccagcctctcttctggtttggtgagtgctgtgtaaataagcatggtagaattgtttggagacatatatagtgatccttggtcactggtgtttcaaacattctggaaagtcacatcgatcaagaatattttttatttttaagaaagcataaccagcaataaaaatactatttttgagtctaaatgaaaaaaaaaaaaaaaaa

SEQ ID NO: 73 - DNA, 1664 bp, Homo sapiens
tttttattctttctgccaggtacatcagatccatcaggtccgagctgtgttgactaccactgcttttcccttcgtctcagttatgtcttggaagaaggctttgcggatccccggagaccttcgggtagcaactgtcaccttgatgctggcgatgctgagctccctactggctgagggcagagactctcccgaggatttcgtgttccagtttaagggcatgtgctacttcaccaacgggacggagcgcgtgcgtcttgtgaccagatacatctataaccgagaggagtacgcgcgcttcgacagcgacgtgggggtgtaccgcgcggtgacgccgcaggggcggcctgatgccgagtactggaacagccagaaggaagtcctggaggggacccgggcggagttggacacggtgtgcagacacaactacgaggtggcgttccgcgggatcttgcagaggagagtggagcccacagtgaccatctccccatccaggacagaggccctcaaccaccacaacctgctggtctgctcggtgacagatttctatccaggccagatcaaagtccggtggtttcggaatgatcaggaggagacagccggcgttgtgtccaccccccttattaggaatggtgactggactttccagatcctggtgatgctggaaatgactccccagcgtggagatgtctacacctgccacgtggagcaccccagcctccagagccccatcaccgtggagtggcgggctcagtctgaatctgcccagagcaagatgctgagtggcgttggaggcttcgtgctggggctgatcttccttgggctgggccttatcatccgtcaaaggagtcagaaaggacctcaagggcctccaccagcagggcttctgcactgactcctgagactattttaactaggattggttatcactcttctgtgatgcctgcttatgcctgcccagaattcccagctgcctgtgtcagcttgtccccctgagatcaaagtcctacagtggctgtcacgcagccaccaggtcatctcctttcatccccaccccaaggcgctggctgtgactctgcttcctgcactgacccagagcctctgcctgtgcatggccagctgcgtctactcaggtcccaaggggtttctgtttctattctttcctcagactgctcaagagaagcacatgaaaaacattacctgactttagagcttttttacataattaaacatgatcctgagttatctgtattctgaactttcttaattgagaagaggcaggaaatcactgcagaatgaaggaacatcccttgaggtgacccagcaaacctgtggccagaaggaggattgtaccttgaaaagacactgaaagcattttggggtgtgaagtaagggtgggcagaggaggtagaaaataattcaattgtcgcatcattcatggttctttaatactgatgctcagtgcattggccttagaatatcccagcctctcttctggtttggtgagtgctgtgtaaataagcatggtagaattgtttggagacatatatagtgatccttggtcactggtgtttcaaacattctggaaagtcacatcgatcaagaatattttttatttttaagaaagcataaccagcaataaaaatactatttttgagtctaaatga

SEQ ID NO: 74 - DNA, 1638 bp, Homo sapiens
tttttattctttctgccaggtacatcagatccatcaggtccgagctgtgttgactaccacttttcccttcgtctcaattatgtcttggaaaaaggctttgcggatccccggaggccttcgggcagcaactgtgaccttgatgctgtcgatgctgagcaccccagtggctgagggcagagactctcccgaggatttcgtgtaccagtttaagggcatgtgctacttcaccaacgggacagagcgcgtgcgtcttgtgagcagaagcatctataaccgagaagagatcgtgcgcttcgacagcgacgtgggggagttccgggcggtgacgctgctggggctgcctgccgccgagtactggaacagccagaaggacatcctggagaggaaacgggcggcggtggacagggtgtgcagacacaactaccagttggagctccgcacgaccttgcagcggcgagtggagcccacagtgaccatctccccatccaggacagaggccctcaaccaccacaacctgctggtctgctcggtgacagatttctatccagcccagatcaaagtccggtggtttcggaatgaccaggaggagacagctggcgttgtgtccaccccccttattaggaatggtgactggaccttccagatcctggtgatgctggaaatgactccccagcgtggagacgtctacacctgccacgtggagcaccccagcctccagagccccatcaccgtggagtggcgggctcaatctgaatctgcccagagcaagatgctgagtggcattggaggcttcgtgctggggctgatcttcctcgggctgggccttatcatccatcacaggagtcagaaagggctcctgcactgactcctgagactattttaactgggattggttatcacttttctgtaacgcctgcttgtccctgcccagaattcccagctgtctgtgtcagcctgtccccctgagatcagagtcctacagtggctgtcacgcagccaccaggtcatctcctttcatccccaccttgaggcggatggctgtgaccctacttcctgcactgacccacagcctctgcctgtgcacggccagctgcatctactcaggccccaaggggtttctgtttctattctctcctcagactgctcaagagaagcacatgaaaaccattacctgactttagagcttttttacataattaaacatgatcctgagttatctgtattctgaacttccttaattgagcagaggcaggaaatcactgcagaatgaaggaacataccttgaggtgacccagccaacctgtgcccagaaggagggttgtaccttgaaaagacactgaaagaatttggggtgcaaagtcatggtgggcagaggaggtagaaaatcaactcagttgttgcatcattcatggttctttcatattgatgttcagtgcagtggcctgagaatatcccagcctctcttctggtttggtgagtgctatataagtaaacatggtggaattgtttgggggcagatatagtgacccttggtcactggtgtttcaaacattctggcaagtcacatcaatcaagaataatttttacttttaagaaagcataaccagcaataaaagtattatttttgattctaaatga

SEQ ID NO: 75 - DNA, 1388 bp, Homo sapiens
gatttatactcttaatgggtactttctgactgaattttatgagctcattctgaagaggctgacgattttactatctcatttttttcctttctccagaatgggttctgggtgggtcccctgggtggtggctctgctagtgaatctgacccgactggattcctccatgactcaaggcacagactctccagaagattttgtgattcaggcaaaggctgactgttacttcaccaacgggacagaaaaggtgcagtttgtggtcagattcatctttaacttggaggagtatgtacgtttcgacagtgatgtggggatgtttgtggcattgaccaagctggggcagccagatgctgagcagtggaacagccggctggatctcttggagaggagcagacaggccgtggatggggtctgtagacacaactacaggctgggcgcacccttcactgtggggagaaaagtgcaaccagaggtgacagtgtacccagagaggaccccactcctgcaccagcataatctgctgcactgctctgtgacaggcttctatccaggggatatcaagatcaagtggttcctgaatgggcaggaggagagagctggggtcatgtccactggccctatcaggaatggagactggacctttcagactgtggtgatgctagaaatgactcctgaacttggacatgtctacacctgccttgtcgatcactccagcctgctgagccctgtttctgtggagtggagagctcagtctgaatattcttggagaaagatgctgagtggcattgcagccttcctacttgggctaatcttccttctggtgggaatcgtcatccagctaagggctcagaaaggatatgtgaggacgcagatgtctggtaatgaggtctcaagagctgttctgctccctcagtcatgctaaggtcctcactgaagcttctctctctggagcctgaagtagtgatgagtagtctgggccctgggtgaggtaaaggacattcatgaggtcaatgttctgggaataactctcttccctgatccttggaggagcccgaactgattctggagctctgtgttctgagatcatgcatctcccacccatctgcccttctcccttctacgtgtacatcattaatccccattgccaagggcattgtccagaaactcccctgagaccttactccttccagccccaaatcatttacttttctgtggtccagccctactcctataagtcatgatctccaaagctttctgtcttccaactgcagtctccacagtcttcagaagacaaatgctcaggtagtcactgtttccttttcactgtttttaaaaaccttttattgtcaaataaaatggagatacaaaaaatgtaaaaaaaaaaaaaaaaa

SEQ ID NO: 76 - DNA, 1697 bp, Homo sapiens
atttccagtgctagaggcccacagtttcagtctcatctgcctccactcggcctcagttcctcatcactgttcctgtgctcacagtcatcaattatagaccccacaacatgcgccctgaagacagaatgttccatatcagagctgtgatcttgagagccctctccttggctttcctgctgagtctccgaggagctggggccatcaaggcggaccatgtgtcaacttatgccgcgtttgtacagacgcatagaccaacaggggagtttatgtttgaatttgatgaagatgagatgttctatgtggatctggacaagaaggagaccgtctggcatctggaggagtttggccaagccttttcctttgaggctcagggcgggctggctaacattgctatattgaacaacaacttgaataccttgatccagcgttccaaccacactcaggccaccaacgatccccctgaggtgaccgtgtttcccaaggagcctgtggagctgggccagcccaacaccctcatctgccacattgacaagttcttcccaccagtgctcaacgtcacgtggctgtgcaacggggagctggtcactgagggtgtcgctgagagcctcttcctgcccagaacagattacagcttccacaagttccattacctgacctttgtgccctcagcagaggacttctatgactgcagggtggagcactggggcttggaccagccgctcctcaagcactgggaggcccaagagccaatccagatgcctgagacaacggagactgtgctctgtgccctgggcctggtgctgggcctagtcggcatcatcgtgggcaccgtcctcatcataaagtctctgcgttctggccatgacccccgggcccaggggaccctgtgaaatactgtaaaggtgacaaaatatctgaacagaagaggacttaggagagatctgaactccagctgccctacaaactccatctcagcttttcttctcacttcatgtgaaaactactccagtggctgactgaattgctgacccttcaagctctgtccttatccattacctcaaagcagtcattccttagtaaagtttccaacaaatagaaattaatgacactttggtagcactaatatggagattatcctttcattgagccttttatcctctgttctcctttgaagaacccctcactgtcaccttcccgagaataccctaagaccaataaatacttcagtatttcagagcggggagactctgagtcattcttactggaagtctaggaccaggtcacatgtgaatactatttcttgaaggtgtggtttcaacctctgttgccgatgtggttactaaaggttctgatcccacttgaacggaaaggtctgaggatattgattcagtcctgggtttttccctaactacaggatagggtggggtagagaaaggatatttgggggaaattttacttggatgaagattttcttggatgtagtttgaagactgcagtgtttgaagtctctgagggaagagatttggtctgtctggatcaagatttcaggcagattaggattccattcacagcccctgagcttccttcccaaggctgtattgtaattatagcaatatttcatggaggatttttctacatgataaactaagagccaagaaataaaatttttaaaatgccctaaaaaaaaaaaaaaaaaa

SEQ ID NO: 77 - DNA, 1122 bp, Homo sapiens
gatctaaggccaccctctcggggagggagttggggaagctgggttggctgggttggtagctcctacctactgtgtggcaagaaggtatgggtcatgaacagaaccaaggagctgcgctgctacagatgttaccacttctgtggctgctaccccactcctgggccgtccctgaagctcctactccaatgtggccagatgacctgcaaaaccacacattcctgcacacagtgtactgccaggatgggagtcccagtgtgggactctctgaggcctacgacgaggaccagcttttcttcttcgacttttcccagaacactcgggtgcctcgcctgcccgaatttgctgactgggctcaggaacagggagatgctcctgccattttatttgacaaagagttctgcgagtggatgatccagcaaatagggccaaaacttgatgggaaaatcccggtgtccagagggtttcctatcgctgaagtgttcacgctgaagcccctggagtttggcaagcccaacactttggtctgttttgtcagtaatctcttcccacccatgctgacagtgaactggcagcatcattccgtccctgtggaaggatttgggcctacttttgtctcagctgtcgatggactcagcttccaggccttttcttacttaaacttcacaccagaaccttctgacattttctcctgcattgtgactcacgaaattgaccgctacacagcaattgcctattgggtaccccggaacgcactgccctcagatctgctggagaatgtgctgtgtggcgtggcctttggcctgggtgtgctgggcatcatcgtgggcattgttctcatcatctacttccggaagccttgctcaggtgactgattcttccagaccagagtttgatgccagcagcttcggccatccaaacagaggatgctcagatttctcacatcctgcccaggatctcctcttagggtagaagtctctgggacatccctggggtgtgtgtgtagatttcccacctggggactctgctgtccctgggcttgcatcccagggatcccagagtggcctgcctatcacaaccacatcccttccccccacaaggcaataaatctcatttctttatatc

SEQ ID NO: 78 - DNA, 1301 bp, Homo sapiens
tttctcactcccattgggcgtcgcgtttctagagaagccaatcagtgtcgccgcagttcccaggttctaaagtcccacgcaccccgcgggactcatatttttcccagacgcggaggttggggtcatggcgccccgaagcctcctcctgctgctctcaggggccctggccctgaccgatacttgggcgggctcccactccttgaggtatttcagcaccgctgtgtcgcggcccggccgcggggagccccgctacatcgccgtggagtacgtagacgacacgcaattcctgcggttcgacagcgacgccgcgattccgaggatggagccgcgggagccgtgggtggagcaagaggggccgcagtattgggagtggaccacagggtacgccaaggccaacgcacagactgaccgagtggccctgaggaacctgctccgccgctacaaccagagcgaggctgggtctcacaccctccagggaatgaatggctgcgacatggggcccgacggacgcctcctccgcgggtatcaccagcacgcgtacgacggcaaggattacatctccctgaacgaggacctgcgctcctggaccgcggcggacaccgtggctcagatcacccagcgcttctatgaggcagaggaatatgcagaggagttcaggacctacctggagggcgagtgcctggagttgctccgcagatacttggagaatgggaaggagacgctacagcgcgcagatcctccaaaggcacacgttgcccaccaccccatctctgaccatgaggccaccctgaggtgctgggccctgggcttctaccctgcggagatcacgctgacctggcagcgggatggggaggaacagacccaggacacagagcttgtggagaccaggcctgcaggggatggaaccttccagaagtgggccgctgtggtggtgcctcctggagaggaacagagatacacatgccatgtgcagcacgaggggctgccccagcccctcatcctgagatgggagcagtctccccagcccaccatccccatcgtgggcatcgttgctggccttgttgtccttggagctgtggtcactggagctgtggtcgctgctgtgatgtggaggaagaagagctcagatagaaacagagggagctactctcaggctgcagtgtgagacagcttccttgtgtgggactgagaagcaagatatcaatgtagcagaattgcacttgtgcctcacgaacatacataaattttaaaaataaagaataaaaatatatctttttatagataaaaaaaaaaaaaaaaaa

SEQ ID NO: 79 - DNA, 1591 bp, Homo sapiens
tttctcactcccattgggcgtcgcgtttctagagaagccaatcagtgtcgccgcagttcccaggttctaaagtcccacgcaccccgcgggactcatatttttcccagacgcggaggttggggtcatggcgccccgaagcctcctcctgctgctctcaggggccctggccctgaccgatacttgggcgggctcccactccttgaggtatttcagcaccgctgtgtcgcggcccggccgcggggagccccgctacatcgccgtggagtacgtagacgacacgcaattcctgcggttcgacagcgacgccgcgattccgaggatggagccgcgggagccgtgggtggagcaagaggggccgcagtattgggagtggaccacagggtacgccaaggccaacgcacagactgaccgagtggccctgaggaacctgctccgccgctacaaccagagcgaggctgggtctcacaccctccagggaatgaatggctgcgacatggggcccgacggacgcctcctccgcgggtatcaccagcacgcgtacgacggcaaggattacatctccctgaacgaggacctgcgctcctggaccgcggcggacaccgtggctcagatcacccagcgcttctatgaggcagaggaatatgcagaggagttcaggacctacctggagggcgagtgcctggagttgctccgcagatacttggagaatgggaaggagacgctacagcgcgcagatcctccaaaggcacacgttgcccaccaccccatctctgaccatgaggccaccctgaggtgctgggccctgggcttctaccctgcggagatcacgctgacctggcagcgggatggggaggaacagacccaggacacagagcttgtggagaccaggcctgcaggggatggaaccttccagaagtgggccgctgtggtggtgcctcctggagaggaacagagatacacatgccatgtgcagcacgaggggctgccccagcccctcatcctgagatgggagcagtctccccagcccaccatccccatcgtgggcatcgttgctggccttgttgtccttggagctgtggtcactggagctgtggtcgctgctgtgatgtggaggaagaagagctcagatagaaacagagggagctactctcaggctgcagcctactcagtggtcagcggaaacttgatgataacatggtggtcaagcttatttctcctgggggtgctcttccaaggatatttgggctgcctccggagtcacagtgtcttgggccgccggaaggtgggtgacatgtggatcttgttttttttgtggctgtggacatctttcaacactgccttcttggccttgcaaagccttcgctttggcttcggctttaggaggggcaggagcttccttcttcgttcttggcaccatcttatgaaaagggtccagattaagatttttgactgagtcattctaaagtaagttgcaagacccatgatactagaccactaaatacttcatcacacacctcctaagaataagaaccaacattatcacaccaaagaaaataaataattccataatattaaaaaaaaaaaaaaaaaa

SEQ ID NO: 80 - DNA, 1025 bp, Homo sapiens
tttctcactcccattgggcgtcgcgtttctagagaagccaatcagtgtcgccgcagttcccaggttctaaagtcccacgcaccccgcgggactcatatttttcccagacgcggaggttggggtcatggcgccccgaagcctcctcctgctgctctcaggggccctggccctgaccgatacttgggcgggctcccactccttgaggtatttcagcaccgctgtgtcgcggcccggccgcggggagccccgctacatcgccgtggagtacgtagacgacacgcaattcctgcggttcgacagcgacgccgcgattccgaggatggagccgcgggagccgtgggtggagcaagaggggccgcagtattgggagtggaccacagggtacgccaaggccaacgcacagactgaccgagtggccctgaggaacctgctccgccgctacaaccagagcgaggctgggtctcacaccctccagggaatgaatggctgcgacatggggcccgacggacgcctcctccgcgggtatcaccagcacgcgtacgacggcaaggattacatctccctgaacgaggacctgcgctcctggaccgcggcggacaccgtggctcagatcacccagcgcttctatgaggcagaggaatatgcagaggagttcaggacctacctggagggcgagtgcctggagttgctccgcagatacttggagaatgggaaggagacgctacagcgcgcagagcagtctccccagcccaccatccccatcgtgggcatcgttgctggccttgttgtccttggagctgtggtcactggagctgtggtcgctgctgtgatgtggaggaagaagagctcagatagaaacagagggagctactctcaggctgcagtgtgagacagcttccttgtgtgggactgagaagcaagatatcaatgtagcagaattgcacttgtgcctcacgaacatacataaattttaaaaataaagaataaaaatatatctttttatagataaaaaaaaaaaaaaaaaa

SEQ ID NO: 81 - DNA, 1578 bp, Homo sapiens
agtgtggtactttgtcttgaggagatgtcctggactcacacggaaacttagggctacggaatgaagttctcactcccattaggtgacaggtttttagagaagccaatcagcgtcgccgcggtcctggttctaaagtcctcgctcacccacccggactcattctccccagacgccaaggatggtggtcatggcgccccgaaccctcttcctgctgctctcgggggccctgaccctgaccgagacctgggcgggctcccactccatgaggtatttcagcgccgccgtgtcccggcccggccgcggggagccccgcttcatcgccatgggctacgtggacgacacgcagttcgtgcggttcgacagcgactcggcgtgtccgaggatggagccgcgggcgccgtgggtggagcaggaggggccggagtattgggaagaggagacacggaacaccaaggcccacgcacagactgacagaatgaacctgcagaccctgcgcggctactacaaccagagcgaggccagttctcacaccctccagtggatgattggctgcgacctggggtccgacggacgcctcctccgcgggtatgaacagtatgcctacgatggcaaggattacctcgccctgaacgaggacctgcgctcctggaccgcagcggacactgcggctcagatctccaagcgcaagtgtgaggcggccaatgtggctgaacaaaggagagcctacctggagggcacgtgcgtggagtggctccacagatacctggagaacgggaaggagatgctgcagcgcgcggacccccccaagacacacgtgacccaccaccctgtctttgactatgaggccaccctgaggtgctgggccctgggcttctaccctgcggagatcatactgacctggcagcgggatggggaggaccagacccaggacgtggagctcgtggagaccaggcctgcaggggatggaaccttccagaagtgggcagctgtggtggtgccttctggagaggagcagagatacacgtgccatgtgcagcatgaggggctgccggagcccctcatgctgagatggaagcagtcttccctgcccaccatccccatcatgggtatcgttgctggcctggttgtccttgcagctgtagtcactggagctgcggtcgctgctgtgctgtggagaaagaagagctcagattgaaaaggagggagctactctcaggctgcaatgtgaaacagctgccctgtgtgggactgagtggcaagtccctttgtgacttcaagaaccctgactcctctttgtgcagagaccagcccacccctgtgcccaccatgaccctcttcctcatgctgaactgcattccttccccaatcacctttcctgttccagaaaaggggctgggatgtctccgtctctgtctcaaatttgtggtccactgagctataacttacttctgtattaaaattagaatctgagtataaatttactttttcaaattatttccaagagagattgatgggttaattaaaggagaagattcctgaaatttgagagacaaaataaatggaagacatgagaacttt

SEQ ID NO: 82 - DNA, 914 bp, Homo sapiens
gcatggggaggggcggccctcaaacgggtcattgccattaatagagacctcaaacaccgcctgctaaaaatacccgactggaggagcataaaagcgcagccgagcccagcgccccgcacttttctgagcagacgtccagagcagagtcagccagcatgaccgagcgccgcgtccccttctcgctcctgcggggccccagctgggaccccttccgcgactggtacccgcatagccgcctcttcgaccaggccttcgggctgccccggctgccggaggagtggtcgcagtggttaggcggcagcagctggccaggctacgtgcgccccctgccccccgccgccatcgagagccccgcagtggccgcgcccgcctacagccgcgcgctcagccggcaactcagcagcggggtctcggagatccggcacactgcggaccgctggcgcgtgtccctggatgtcaaccacttcgccccggacgagctgacggtcaagaccaaggatggcgtggtggagatcaccggcaagcacgaggagcggcaggacgagcatggctacatctcccggtgcttcacgcggaaatacacgctgccccccggtgtggaccccacccaagtttcctcctccctgtcccctgagggcacactgaccgtggaggcccccatgcccaagctagccacgcagtccaacgagatcaccatcccagtcaccttcgagtcgcgggcccagcttgggggcccagaagctgcaaaatccgatgagactgccgccaagtaaagccttagcccggatgcccacccctgctgccgccactggctgtgcctcccccgccacctgtgtgttcttttgatacatttatcttctgtttttctcaaataaagttcaaagcaaccacctgtcaaaaaaaaaaaaaaaaaa

SEQ ID NO: 83 - DNA, 3366 bp, Homo sapiens
gcatgcgtaggcgcgcggccgcggcggcggctggggagggttcttccggaaggttcgggaggcttctggaaaaagcgccgcgcgctgggcgggcccgtcgctatataaggcaggcgcgggggtggcgcgtcagttgcttcagcgtcccggtgtggctgtgccgttggtcctgtgcggtcacttagccaagatgcctgaggaaacccagacccaagaccaaccgatggaggaggaggaggttgagacgttcgcctttcaggcagaaattgcccagttgatgtcattgatcatcaatactttctactcgaacaaagagatctttctgagagagctcatttcaaattcatcagatgcattggacaaaatccggtatgaaagcttgacagatcccagtaaattagactctgggaaagagctgcatattaaccttataccgaacaaacaagatcgaactctcactattgtggatactggaattggaatgaccaaggctgacttgatcaataaccttggtactatcgccaagtctgggaccaaagcgttcatggaagctttgcaggctggtgcagatatctctatgattggccagttcggtgttggtttttattctgcttatttggttgctgagaaagtaactgtgatcaccaaacataacgatgatgagcagtacgcttgggagtcctcagcagggggatcattcacagtgaggacagacacaggtgaacctatgggtcgtggaacaaaagttatcctacacctgaaagaagaccaaactgagtacttggaggaacgaagaataaaggagattgtgaagaaacattctcagtttattggatatcccattactctttttgtggagaaggaacgtgataaagaagtaagcgatgatgaggctgaagaaaaggaagacaaagaagaagaaaaagaaaaagaagagaaagagtcggaagacaaacctgaaattgaagatgttggttctgatgaggaagaagaaaagaaggatggtgacaagaagaagaagaagaagattaaggaaaagtacatcgatcaagaagagctcaacaaaacaaagcccatctggaccagaaatcccgacgatattactaatgaggagtacggagaattctataagagcttgaccaatgactgggaagatcacttggcagtgaagcatttttcagttgaaggacagttggaattcagagcccttctatttgtcccacgacgtgctccttttgatctgtttgaaaacagaaagaaaaagaacaacatcaaattgtatgtacgcagagttttcatcatggataactgtgaggagctaatccctgaatatctgaacttcattagaggggtggtagactcggaggatctccctctaaacatatcccgtgagatgttgcaacaaagcaaaattttgaaagttatcaggaagaatttggtcaaaaaatgcttagaactctttactgaactggcggaagataaagagaactacaagaaattctatgagcagttctctaaaaacataaagcttggaatacacgaagactctcaaaatcggaagaagctttcagagctgttaaggtactacacatctgcctctggtgatgagatggtttctctcaaggactactgcaccagaatgaaggagaaccagaaacatatctattatatcacaggtgagaccaaggaccaggtagctaactcagcctttgtggaacgtcttcggaaacatggcttagaagtgatctatatgattgagcccattgatgagtactgtgtccaacagctgaaggaatttgaggggaagactttagtgtcagtcaccaaagaaggcctggaacttccagaggatgaagaagagaaaaagaagcaggaagagaaaaaaacaaagtttgagaacctctgcaaaatcatgaaagacatattggagaaaaaagttgaaaaggtggttgtgtcaaaccgattggtgacatctccatgctgtattgtcacaagcacatatggctggacagcaaacatggagagaatcatgaaagctcaagccctaagagacaactcaacaatgggttacatggcagcaaagaaacacctggagataaaccctgaccattccattattgagaccttaaggcaaaaggcagaggctgataagaacgacaagtctgtgaaggatctggtcatcttgctttatgaaactgcgctcctgtcttctggcttcagtctggaagatccccagacacatgctaacaggatctacaggatgatcaaacttggtctgggtattgatgaagatgaccctactgctgatgataccagtgctgctgtaactgaagaaatgccaccccttgaaggagatgacgacacatcacgcatggaagaagtagactaatctctggctgagggatgacttacctgttcagtactctacaattcctctgataatatattttcaaggatgtttttctttatttttgttaatattaaaaagtctgtatggcatgacaactactttaaggggaagataagatttctgtctactaagtgatgctgtgataccttaggcactaaagcagagctagtaatgctttttgagtttcatgttggtttattttcacagattggggtaacgtgcactgtaagacgtatgtaacatgatgttaactttgtggtctaaagtgtttagctgtcaagccggatgcctaagtagaccaaatcttgttattgaagtgttctgagctgtatcttgatgtttagaaaagtattcgttacatcttgtaggatctactttttgaacttttcattccctgtagttgacaattctgcatgtactagtcctctagaaataggttaaactgaagcaacttgatggaaggatctctccacagggcttgttttccaaagaaaagtattgtttggaggagcaaagttaaaagcctacctaagcatatcgtaaagctgttcaaaaataactcagacccagtcttgtggatggaaatgtagtgctcgagtcacattctgcttaaagttgtaacaaatacagatgagttaaaagatattgtgtgacagtgtcttatttagggggaaaggggagtatctggatgacagttagtgccaaaatgtaaaacatgaggcgctagcaggagatggttaaacactagctgctccaagggttgacatggtcttcccagcatgtactcagcaggtgtggggtggagcacacgtaggcacagaaaacaggaatgcagacaacatgcatcccctgcgtccatgagttacatgtgttctcttagtgtccacgttgttttgatgttattcatggaataccttctgtgttaaatacagtcacttaattccttggccttaaaa

SEQ ID NO: 84 - DNA, 1480 bp, Homo sapiens
actgcaacgcggaggagcaggatggagatccctgtgcctgtgcagccgtcttggctgcgccgcgcctcggccccgttgcccggactttcggcgcccggacgcctctttgaccagcgcttcggcgaggggctgctggaggccgagctggctgcgctctgccccaccacgctcgccccctactacctgcgcgcacccagcgtggcgctgcccgtcgcccaggtgccgacggaccccggccacttttcggtgctgctagacgtgaagcacttctcgccggaggaaattgctgtcaaggtggtgggcgaacacgtggaggtgcacgcgcgccacgaggagcgcccggatgagcacggattcgtcgcgcgcgagttccaccgtcgctaccgcctgccgcctggcgtggatccggctgccgtgacgtccgcgctgtcccccgagggcgtcctgtccatccaggccgcaccagcgtcggcccaggccccaccgccagccgcagccaagtaggagggggctgggccgcgcccgcaccccgggagcctcctcaggctccctctattaaagccgatctgactccgcccagccagatgtcccgagtgcgccaaggactgtcctctcacccactcctggattctgccctgacctccatcctggacactgccttgataacatagacccttccactgacaccctcgctctcacaccccctccagctttccgaccccacaccgacaactccccggcttccagaccctaccagcactaccctaaccctcagccgacagtctcagccccaccgacccactttcttggcatatagccccacttaagacccctcctctacttccttctgagtcctctacaaagacatccgggtactacatttccatcccttccctattttgacaccaaattatggtgtagacagccctcccccaaccccaggccagtcaggcacaatccccccaccccccaaacgtcctggactgcacagacctcccactccagaccatccaggcctggttcccaagacccgatccttcccctgcaaccagacagtctacaactgccccctccagcccattttctgccgtgaaaccccagccagccacaccagactctggaaccctttttcgactgccccaactcttggacaccaggccaactagaacacccaacaccaaactgtacagactctcccaccccaacctccccagactctgcacggatgtcctaggccccctccccaactctaaccagaccccatccccctaagtccctttgtcttgacccccaagtcttcaaccagatatcctcggcaacccacctcccaccctcctcctcttctccttcaagacccaactgagcacccgctctgattccccacagcctttctccctgccaccactcccttagtctttcccaggcttactctcccaataaatgtgctagagctctgccaaaaaaaaaaaaaaaaaaaaaa

SEQ ID NO: 85 - DNA, 3887 bp, Homo sapiens
gactgcgcaggcgtgctcacctggcgtgctccacccgactgggcgtccgcaggctcctcccccgggtgtggcctccgggcggcatggctgcttcccaggtgatgccggcttcagctagtggggtctagttgaccgttccgcagccgccagggccagcggaaagccggtcagggggaaccgcggcggggctggtgtcatgagcctgaggtgaacttgagggtgcctcctcagcggtctcccgccctgccctgaggggcgccgggaccccaaagagcggaggaagagcgccaccccgacggccaccgcttcggagccagcacgcggggtaccctacggggagcgcggatgcccccgtgttcgggcggggacggctccacccctcctgggccctcccttcgggacagggactgtcccgcccagagtgctgaatacccgcgcgaccgtctggatccccgcccaggaagcccctctgaagcctcctcgccgccgtttctgagaagcagggcacctgttaactggtaccaagaaaaggcccaagtgtttctctggcatctgatggtgtctggatccaccactctactctgtctctggaaacagcccttccacgtctctgcattccctgtcaccgcgtcactggccttcagacagagccaaggtgcagggcaacacctctacaaggatctgcagccatttatattgcttaggctactgatgcctgaggaaacccagacccaagaccaaccgatggaggaggaggaggttgagacgttcgcctttcaggcagaaattgcccagttgatgtcattgatcatcaatactttctactcgaacaaagagatctttctgagagagctcatttcaaattcatcagatgcattggacaaaatccggtatgaaagcttgacagatcccagtaaattagactctgggaaagagctgcatattaaccttataccgaacaaacaagatcgaactctcactattgtggatactggaattggaatgaccaaggctgacttgatcaataaccttggtactatcgccaagtctgggaccaaagcgttcatggaagctttgcaggctggtgcagatatctctatgattggccagttcggtgttggtttttattctgcttatttggttgctgagaaagtaactgtgatcaccaaacataacgatgatgagcagtacgcttgggagtcctcagcagggggatcattcacagtgaggacagacacaggtgaacctatgggtcgtggaacaaaagttatcctacacctgaaagaagaccaaactgagtacttggaggaacgaagaataaaggagattgtgaagaaacattctcagtttattggatatcccattactctttttgtggagaaggaacgtgataaagaagtaagcgatgatgaggctgaagaaaaggaagacaaagaagaagaaaaagaaaaagaagagaaagagtcggaagacaaacctgaaattgaagatgttggttctgatgaggaagaagaaaagaaggatggtgacaagaagaagaagaagaagattaaggaaaagtacatcgatcaagaagagctcaacaaaacaaagcccatctggaccagaaatcccgacgatattactaatgaggagtacggagaattctataagagcttgaccaatgactgggaagatcacttggcagtgaagcatttttcagttgaaggacagttggaattcagagcccttctatttgtcccacgacgtgctccttttgatctgtttgaaaacagaaagaaaaagaacaacatcaaattgtatgtacgcagagttttcatcatggataactgtgaggagctaatccctgaatatctgaacttcattagaggggtggtagactcggaggatctccctctaaacatatcccgtgagatgttgcaacaaagcaaaattttgaaagttatcaggaagaatttggtcaaaaaatgcttagaactctttactgaactggcggaagataaagagaactacaagaaattctatgagcagttctctaaaaacataaagcttggaatacacgaagactctcaaaatcggaagaagctttcagagctgttaaggtactacacatctgcctctggtgatgagatggtttctctcaaggactactgcaccagaatgaaggagaaccagaaacatatctattatatcacaggtgagaccaaggaccaggtagctaactcagcctttgtggaacgtcttcggaaacatggcttagaagtgatctatatgattgagcccattgatgagtactgtgtccaacagctgaaggaatttgaggggaagactttagtgtcagtcaccaaagaaggcctggaacttccagaggatgaagaagagaaaaagaagcaggaagagaaaaaaacaaagtttgagaacctctgcaaaatcatgaaagacatattggagaaaaaagttgaaaaggtggttgtgtcaaaccgattggtgacatctccatgctgtattgtcacaagcacatatggctggacagcaaacatggagagaatcatgaaagctcaagccctaagagacaactcaacaatgggttacatggcagcaaagaaacacctggagataaaccctgaccattccattattgagaccttaaggcaaaaggcagaggctgataagaacgacaagtctgtgaaggatctggtcatcttgctttatgaaactgcgctcctgtcttctggcttcagtctggaagatccccagacacatgctaacaggatctacaggatgatcaaacttggtctgggtattgatgaagatgaccctactgctgatgataccagtgctgctgtaactgaagaaatgccaccccttgaaggagatgacgacacatcacgcatggaagaagtagactaatctctggctgagggatgacttacctgttcagtactctacaattcctctgataatatattttcaaggatgtttttctttatttttgttaatattaaaaagtctgtatggcatgacaactactttaaggggaagataagatttctgtctactaagtgatgctgtgataccttaggcactaaagcagagctagtaatgctttttgagtttcatgttggtttattttcacagattggggtaacgtgcactgtaagacgtatgtaacatgatgttaactttgtggtctaaagtgtttagctgtcaagccggatgcctaagtagaccaaatcttgttattgaagtgttctgagctgtatcttgatgtttagaaaagtattcgttacatcttgtaggatctactttttgaacttttcattccctgtagttgacaattctgcatgtactagtcctctagaaataggttaaactgaagcaacttgatggaaggatctctccacagggcttgttttccaaagaaaagtattgtttggaggagcaaagttaaaagcctacctaagcatatcgtaaagctgttcaaaaataactcagacccagtcttgtggatggaaatgtagtgctcgagtcacattctgcttaaagttgtaacaaatacagatgagttaaaagatattgtgtgacagtgtcttatttagggggaaaggggagtatctggatgacagttagtgccaaaatgtaaaacatgaggcgctagcaggagatggttaaacactagctgctccaagggttgacatggtcttcccagcatgtactcagcaggtgtggggtggagcacacgtaggcacagaaaacaggaatgcagacaacatgcatcccctgcgtccatgagttacatgtgttctcttagtgtccacgttgttttgatgttattcatggaataccttctgtgttaaatacagtcacttaattccttggccttaaaa

SEQ ID NO: 86 - DNA, 2567 bp, Homo sapiens
ctccggcgcagtgttgggactgtctgggtatcggaaagcaagcctacgttgctcactattacgtataatccttttcttttcaagatgcctgaggaagtgcaccatggagaggaggaggtggagacttttgcctttcaggcagaaattgcccaactcatgtccctcatcatcaataccttctattccaacaaggagattttccttcgggagttgatctctaatgcttctgatgccttggacaagattcgctatgagagcctgacagacccttcgaagttggacagtggtaaagagctgaaaattgacatcatccccaaccctcaggaacgtaccctgactttggtagacacaggcattggcatgaccaaagctgatctcataaataatttgggaaccattgccaagtctggtactaaagcattcatggaggctcttcaggctggtgcagacatctccatgattgggcagtttggtgttggcttttattctgcctacttggtggcagagaaagtggttgtgatcacaaagcacaacgatgatgaacagtatgcttgggagtcttctgctggaggttccttcactgtgcgtgctgaccatggtgagcccattggcaggggtaccaaagtgatcctccatcttaaagaagatcagacagagtacctagaagagaggcgggtcaaagaagtagtgaagaagcattctcagttcataggctatcccatcaccctttatttggagaaggaacgagagaaggaaattagtgatgatgaggcagaggaagagaaaggtgagaaagaagaggaagataaagatgatgaagaaaaacccaagatcgaagatgtgggttcagatgaggaggatgacagcggtaaggataagaagaagaaaactaagaagatcaaagagaaatacattgatcaggaagaactaaacaagaccaagcctatttggaccagaaaccctgatgacatcacccaagaggagtatggagaattctacaagagcctcactaatgactgggaagaccacttggcagtcaagcacttttctgtagaaggtcagttggaattcagggcattgctatttattcctcgtcgggctccctttgacctttttgagaacaagaagaaaaagaacaacatcaaactctatgtccgccgtgtgttcatcatggacagctgtgatgagttgataccagagtatctcaattttatccgtggtgtggttgactctgaggatctgcccctgaacatctcccgagaaatgctccagcagagcaaaatcttgaaagtcattcgcaaaaacattgttaagaagtgccttgagctcttctctgagctggcagaagacaaggagaattacaagaaattctatgaggcattctctaaaaatctcaagcttggaatccacgaagactccactaaccgccgccgcctgtctgagctgctgcgctatcatacctcccagtctggagatgagatgacatctctgtcagagtatgtttctcgcatgaaggagacacagaagtccatctattacatcactggtgagagcaaagagcaggtggccaactcagcttttgtggagcgagtgcggaaacggggcttcgaggtggtatatatgaccgagcccattgacgagtactgtgtgcagcagctcaaggaatttgatgggaagagcctggtctcagttaccaaggagggtctggagctgcctgaggatgaggaggagaagaagaagatggaagagagcaaggcaaagtttgagaacctctgcaagctcatgaaagaaatcttagataagaaggttgagaaggtgacaatctccaatagacttgtgtcttcaccttgctgcattgtgaccagcacctacggctggacagccaatatggagcggatcatgaaagcccaggcacttcgggacaactccaccatgggctatatgatggccaaaaagcacctggagatcaaccctgaccaccccattgtggagacgctgcggcagaaggctgaggccgacaagaatgataaggcagttaaggacctggtggtgctgctgtttgaaaccgccctgctatcttctggcttttcccttgaggatccccagacccactccaaccgcatctatcgcatgatcaagctaggtctaggtattgatgaagatgaagtggcagcagaggaacccaatgctgcagttcctgatgagatcccccctctcgagggcgatgaggatgcgtctcgcatggaagaagtcgattaggttaggagttcatagttggaaaacttgtgcccttgtatagtgtccccatgggctcccactgcagcctcgagtgcccctgtcccacctggctccccctgctggtgtctagtgtttttttccctctcctgtccttgtgttgaaggcagtaaactaagggtgtcaagccccattccctctctactcttgacagcaggattggatgttgtgtattgtggtttattttattttcttcattttgttctgaaattaaagtatgcaaaataaagaatatgccgttttaaaaaaaaaaaaaaaaaaaaaaaaaaaaa

SEQ ID NO: 87 - DNA, 965 bp, Homo sapiens
acccgcgcagggtgtgctagcgcgctcagccctctccggccggcttagtctagttcccgggcctcgctcggttccagaactttccagaaaatgccgcgctccctacggctcaagggtcaaatcgcgtcatttccgggaggggacgaaggggtagttctttcacctcggctgggcgcctagaaaagcctagaaacagctccttttttcttccgcctccgagtcttcgcgtcagcgtcctgcgcagggcccttggggcgaatcgcggtgcgcgtcggggcgaccgccctccctccctgggaggggcgagggggctagcggcgaccgctggggcgagcgcgcctgcgcgctgggtgattttttcacgtgtcgccagggccggactgcgagtctctttgcggcgctacactagagcagagtacgagtctgaggcggagggagtaatggcaggacaagcgtttagaaagtttcttccactctttgaccgagtattggttgaaaggagtgctgctgaaactgtaaccaaaggaggcattatgcttccagaaaaatctcaaggaaaagtattgcaagcaacagtagtcgctgttggatcgggttctaaaggaaagggtggagagattcaaccagttagcgtgaaagttggagataaagttcttctcccagaatatggaggcaccaaagtagttctagatgacaaggattatttcctatttagagatggtgacattcttggaaagtacgtagactgaaataagtcactattgaaatggcatcaacatgatgctgcccattccactgaagttctgaaatctttcgtcatgtaaataatttccatatttctcttttataataaactaatgataactaatgacatccagtgtctccaaaattgtttccttgtactgatataaacacttccaaataaaaatatgtaaatgagtggttaatctttaaaaaaaaaaaaa

SEQ ID NO: 88 - DNA, 2551 bp, Homo sapiens
ggaaaacggccagcctgaggagctgctgcgagggtccgcttcgtctttcgagagtgactcccgcggtcccaaggctttccagagcgaacctgtgcggctgcaggcaccggcgtgttgagtttccggcgttccgaaggactgagctcttgtcgcggatcccgtccgccgtttccagcccccagtctcagagcggagcccacagagcagggcaccggcatggccaaagccgcggcgatcggcatcgacctgggcaccacctactcctgcgtgggggtgttccaacacggcaaggtggagatcatcgccaacgaccagggcaaccgcaccacccccagctacgtggccttcacggacaccgagcggctcatcggggatgcggccaagaaccaggtggcgctgaacccgcagaacaccgtgtttgacgcgaagcggctgatcggccgcaagttcggcgacccggtggtgcagtcggacatgaagcactggcctttccaggtgatcaacgacggagacaagcccaaggtgcaggtgagctacaagggggagaccaaggcattctaccccgaggagatctcgtccatggtgctgaccaagatgaaggagatcgccgaggcgtacctgggctacccggtgaccaacgcggtgatcaccgtgccggcctacttcaacgactcgcagcgccaggccaccaaggatgcgggtgtgatcgcggggctcaacgtgctgcggatcatcaacgagcccacggccgccgccatcgcctacggcctggacagaacgggcaagggggagcgcaacgtgctcatctttgacctgggcgggggcaccttcgacgtgtccatcctgacgatcgacgacggcatcttcgaggtgaaggccacggccggggacacccacctgggtggggaggactttgacaacaggctggtgaaccacttcgtggaggagttcaagagaaaacacaagaaggacatcagccagaacaagcgagccgtgaggcggctgcgcaccgcctgcgagagggccaagaggaccctgtcgtccagcacccaggccagcctggagatcgactccctgtttgagggcatcgacttctacacgtccatcaccagggcgaggttcgaggagctgtgctccgacctgttccgaagcaccctggagcccgtggagaaggctctgcgcgacgccaagctggacaaggcccagattcacgacctggtcctggtcgggggctccacccgcatccccaaggtgcagaagctgctgcaggacttcttcaacgggcgcgacctgaacaagagcatcaaccccgacgaggctgtggcctacggggcggcggtgcaggcggccatcctgatgggggacaagtccgagaacgtgcaggacctgctgctgctggacgtggctcccctgtcgctggggctggagacggccggaggcgtgatgactgccctgatcaagcgcaactccaccatccccaccaagcagacgcagatcttcaccacctactccgacaaccaacccggggtgctgatccaggtgtacgagggcgagagggccatgacgaaagacaacaatctgttggggcgcttcgagctgagcggcatccctccggcccccaggggcgtgccccagatcgaggtgaccttcgacatcgatgccaacggcatcctgaacgtcacggccacggacaagagcaccggcaaggccaacaagatcaccatcaccaacgacaagggccgcctgagcaaggaggagatcgagcgcatggtgcaggaggcggagaagtacaaagcggaggacgaggtgcagcgcgagagggtgtcagccaagaacgccctggagtcctacgccttcaacatgaagagcgccgtggaggatgaggggctcaagggcaagatcagcgaggcggacaagaagaaggttctggacaagtgtcaagaggtcatctcgtggctggacgccaacaccttggccgagaaggacgagtttgagcacaagaggaaggagctggagcaggtgtgtaaccccatcatcagcggactgtaccagggtgccggtggtcccgggcctggcggcttcggggctcagggtcccaagggagggtctgggtcaggccctaccattgaggaggtggattaggggcctttgttctttagtatgtttgtctttgaggtggactgttgggactcaaggactttgctgctgttttcctatgtcatttctgcttcagctctttgctgcttcacttctttgtaaagttgtaacctgatggtaattagctggcttcattatttttgtagtacaaccgatatgttcattagaattctttgcatttaatgttgatactgtaagggtgtttcgttccctttaaatgaatcaacactgccaccttctgtacgagtttgtttgttttttttttttttttttttttttgcttggcgaaaacactacaaaggctgggaatgtatgtttttataatttgtttatttaaatatgaaaaataaaatgttaaactttaaaaaaaaaaaaaaaaaaaaaaaaaaaaaaa

SEQ ID NO: 89 - DNA, 2445 bp, Homo sapiens
ataaaagcccaggggcaagcggtccggataacggctagcctgaggagctgctgcgacagtccactacctttttcgagagtgactcccgttgtcccaaggcttcccagagcgaacctgtgcggctgcaggcaccggcgcgtcgagtttccggcgtccggaaggaccgagctcttctcgcggatccagtgttccgtttccagcccccaatctcagagcggagccgacagagagcagggaaccggcatggccaaagccgcggcgatcggcatcgacctgggcaccacctactcctgcgtgggggtgttccaacacggcaaggtggagatcatcgccaacgaccagggcaaccgcaccacccccagctacgtggccttcacggacaccgagcggctcatcggggatgcggccaagaaccaggtggcgctgaacccgcagaacaccgtgtttgacgcgaagcggctgattggccgcaagttcggcgacccggtggtgcagtcggacatgaagcactggcctttccaggtgatcaacgacggagacaagcccaaggtgcaggtgagctacaagggggagaccaaggcattctaccccgaggagatctcgtccatggtgctgaccaagatgaaggagatcgccgaggcgtacctgggctacccggtgaccaacgcggtgatcaccgtgccggcctacttcaacgactcgcagcgccaggccaccaaggatgcgggtgtgatcgcggggctcaacgtgctgcggatcatcaacgagcccacggccgccgccatcgcctacggcctggacagaacgggcaagggggagcgcaacgtgctcatctttgacctgggcgggggcaccttcgacgtgtccatcctgacgatcgacgacggcatcttcgaggtgaaggccacggccggggacacccacctgggtggggaggactttgacaacaggctggtgaaccacttcgtggaggagttcaagagaaaacacaagaaggacatcagccagaacaagcgagccgtgaggcggctgcgcaccgcctgcgagagggccaagaggaccctgtcgtccagcacccaggccagcctggagatcgactccctgtttgagggcatcgacttctacacgtccatcaccagggcgaggttcgaggagctgtgctccgacctgttccgaagcaccctggagcccgtggagaaggctctgcgcgacgccaagctggacaaggcccagattcacgacctggtcctggtcgggggctccacccgcatccccaaggtgcagaagctgctgcaggacttcttcaacgggcgcgacctgaacaagagcatcaaccccgacgaggctgtggcctacggggcggcggtgcaggcggccatcctgatgggggacaagtccgagaacgtgcaggacctgctgctgctggacgtggctcccctgtcgctggggctggagacggccggaggcgtgatgactgccctgatcaagcgcaactccaccatccccaccaagcagacgcagatcttcaccacctactccgacaaccaacccggggtgctgatccaggtgtacgagggcgagagggccatgacgaaagacaacaatctgttggggcgcttcgagctgagcggcatccctccggcccccaggggcgtgccccagatcgaggtgaccttcgacatcgatgccaacggcatcctgaacgtcacggccacggacaagagcaccggcaaggccaacaagatcaccatcaccaacgacaagggccgcctgagcaaggaggagatcgagcgcatggtgcaggaggcggagaagtacaaagcggaggacgaggtgcagcgcgagagggtgtcagccaagaacgccctggagtcctacgccttcaacatgaagagcgccgtggaggatgaggggctcaagggcaagatcagcgaggcggacaagaagaaggtgctggacaagtgtcaagaggtcatctcgtggctggacgccaacaccttggccgagaaggacgagtttgagcacaagaggaaggagctggagcaggtgtgtaaccccatcatcagcggactgtaccagggtgccggtggtcccgggcctgggggcttcggggctcagggtcccaagggagggtctgggtcaggccccaccattgaggaggtagattaggggcctttccaagattgctgtttttgttttggagcttcaagactttgcatttcctagtatttctgtttgtcagttctcaatttcctgtgtttgcaatgttgaaattttttggtgaagtactgaacttgctttttttccggtttctacatgcagagatgaatttatactgccatcttacgactatttcttctttttaatacacttaactcaggccattttttaagttggttacttcaaagtaaataaactttaaaattcaaaaaaaaaaaaaaaaaa

SEQ ID NO: 90 - DNA, 3680 bp, Homo sapiens
tgagtaaatgccgcagattctggaaagttctgatcagtgcgatacataaggctgaggaagtgggacctccccttttgggtcggtagttcagcgccggcgccggtgtgcgagccgcggcagagtgaggcaggcaacccgaggtgcggagcgacctgcggaggctgagccccgctttctcccagggtttcttatcagccagccgccgctgtccccgggggagtaggaggctcctgacaggccgcggctgtctgtgtgtccttctgagtgtcagaggaacggccagaccccgcgggccggagcagaacgcggccagggcagaaagcggcggcaggagaagcaggcagggggccggaggacgcagaccgagacccgaggcggaggcggaccgcgagccggccatgtcggtggtggggttggacgtgggctcgcagagctgctacatcgcggtagcccgggccgggggcatcgagaccatcgccaatgagttcagcgaccggtgcaccccgtcagtcatatcatttggatcaaaaaatagaacaatcggagttgcagccaaaaatcagcaaatcactcatgcaaacaatacggtgtctaacttcaaaagatttcatggccgagcattcaatgaccccttcattcaaaaggagaaggaaaacttgagttacgatttggttccattgaaaaatggtggagttggaataaaggtaatgtacatgggtgaagaacatctatttagtgtggagcagataacagccatgttgttgactaagctgaaggaaactgctgaaaacagcctcaagaaaccagtaacagattgtgttatttcagtcccctccttctttacagatgctgagaggcgatctgtgttagatgctgcacagattgttggcctaaactgtttaagacttatgaatgacatgacagctgttgctttgaattacggaatttataagcaggatctcccaagcctggatgagaaacctcggatagtggtttttgttgatatgggacattcagcttttcaagtgtctgcttgtgcttttaacaagggaaaattgaaggtactgggaacagcttttgatcctttcttaggaggaaaaaacttcgatgaaaagttagtggaacatttttgtgcagaatttaaaactaagtacaagttggatgcaaaatccaaaatacgagcactcctacgtctgtatcaggaatgtgaaaaactgaaaaagctaatgagctctaacagcacagaccttccactgaatatcgaatgctttatgaatgataaagatgtttccggaaagatgaacaggtcacaatttgaagaactctgtgctgaacttctgcaaaagatagaagtacccctttattcactgttggaacaaactcatctcaaagtagaagatgtgagtgcagttgagattgttggaggcgctacacgaattccagctgtgaaggaaagaattgccaaattctttggaaaagatattagcacaacactcaatgcagatgaagcagtagccagaggatgtgcattacagtgtgcaatactttccccggcatttaaagttagagaattttccgtcacagatgcagttccttttccaatatctctgatctggaaccatgattcagaagatactgaaggtgttcatgaagtctttagtcgaaaccatgctgctcctttctccaaagttctcacctttctgagaagggggccttttgagctagaagctttctattctgatccccaaggagttccatatccagaagcaaaaataggccgctttgtagttcagaatgtttctgcacagaaagatggagaaaaatctagagtaaaagtcaaagtgcgagtcaacacccatggcattttcaccatctctacggcatctatggtggagaaagtcccaactgaggagaatgaaatgtcttctgaagctgacatggagtgtctgaatcagagaccaccagaaaacccagacactgataaaaatgtccagcaagacaacagtgaagctggaacacagccccaggtacaaactgatgctcaacaaacctcacagtctcccccttcacctgaacttacctcagaagaaaacaaaatcccagatgctgacaaagcaaatgaaaaaaaagttgaccagcctccagaagctaaaaagcccaaaataaaggtggtgaatgttgagctgcctattgaagccaacttggtctggcagttagggaaagaccttcttaacatgtatattgagacagagggtaagatgataatgcaagataaattggaaaaagaaaggaatgatgctaaaaatgcagttgaggaatatgtgtatgagttcagagacaagctgtgtggaccatatgaaaaatttatatgtgagcaggatcatcaaaattttttgagactcctcacagaaactgaagactggctgtatgaagaaggagaggaccaagctaaacaagcatatgttgacaagttggaagaattaatgaaaattggcactccagttaaagttcggtttcaggaagctgaagaacggccaaaaatgtttgaagaactaggacagaggctgcagcattatgccaagatagcagctgacttcagaaataaggatgagaaatacaaccatattgatgagtctgaaatgaaaaaagtggagaagtctgttaatgaagtgatggaatggatgaataatgtcatgaatgctcaggctaaaaagagtcttgatcaggatccagttgtacgtgctcaggaaattaaaacaaaaatcaaggaattgaacaacacatgtgaacccgttgtaacacaaccgaaaccaaaaattgaatcacccaaactggaaagaactccaaatggcccaaatattgataaaaaggaagaagatttagaagacaaaaacaattttggtgctgaacctccacatcagaatggtgaatgttaccctaatgagaaaaattctgttaatatggacttggactagataaccttaaattggcctattccttcaattaataaaatatttttgccatagtatgtgactctacataacatactgaaactatttatattttcttttttaaggatatttagaaattttgtgtattatatggaaaaagaaaaaaagcttaagtctgtagtctttatgatcctaaaagggaaaattgccttggtaactttcagattcctgtggaattgtgaattcatactaagctttctgtgcagtctcaccatttgcatcactgaggatgaaactgacttttgtcttttggagaaaaaaaactgtactgcttgttcaagagggctgtgattaaaatctttaagcatttgttcctgccaaggtagttttcttgcattttgctctccattcagcatgtgtgtgggtgtggatgtttataaacaagactaagtctgacttcataagggctttctaaaaccatttctgtccaagagaaaatgactttttgctttgatattaaaaattcaatgagtaaaacaaaagctagtcaaatgtgttagcagcatgcagaacaaaaactttaaactttctctctcactatacagtatattgtcatgtgaaagtgtggaatggaagaaatgtcgatcctgttgtaactgattgtgaacacttttatgagctttaaaataaagttcatcttatggtgtcatttctaaaaaaaaaaaaaaa

SEQ ID NO: 91 - DNA, 2802 bp, Homo sapiens
ccagcagcaggaggcgcgcgaggcaccacggcctggcggccgagagtcagggaggaacctcatttacataacggccgcccctctgtctcctggcgggggccggagtcccgcccctcgtccaacttgaaatctgttgggtcacgggccagtcactccgacctaggcaagcctgtggtggagctggaagagtttgtgagggcggtcccgggagcggattgggtctgggagttcccagaggcggctataagaaccgggaactgggcgcggggagctgagttgctggtagtgcccgtggtgcttggttcgaggtggccgttagttgactccgcggagttcatctccctggttttcccgtcctaacgtcgctcgcctttcagtcaggatgtctgcccgtggcccggctatcggcatcgacctgggcaccacctattcgtgcgtcggggtcttccaacatggcaaggtggagatcatcgccaacgaccagggcaatcgcaccacccccagctacgtggccttcacggacaccgagcgcctcatcggcgacgccgccaagaaccaggtggccatgaaccccaccaacaccatcttcgacgccaagaggctgattggacggaaattcgaggatgccacagtgcagtcggatatgaaacactggccgttccgggtggtgagcgagggaggcaagcccaaagtgcaagtagagtacaagggggagaccaagaccttcttcccagaggagatatcctccatggtcctcacgaagatgaaggagatcgcggaagcctacctggggggcaaggtgcacagcgcggtcataacggtcccggcctatttcaacgactcgcagcgccaggccaccaaggacgcaggcaccatcacggggctcaatgtgctgcgcatcatcaacgagcccacggcggcggccatcgcctacggcctggacaagaagggctgcgcgggcggcgagaagaacgtgctcatctttgacctgggcggtggcactttcgacgtgtccatcctgaccatcgaggatggcatcttcgaggtgaagtccacggccggcgacacccacctgggcggtgaggacttcgacaaccgcatggtgagccacctggcggaggagttcaagcgcaagcacaagaaggacattgggcccaacaagcgcgccgtgaggcggctgcgcaccgcttgcgagcgcgccaagcgcaccctgagctcgtccacgcaggcgagcatcgagatcgactcgctctacgagggcgtggacttctatacgtccatcacgcgcgcccgcttcgaggagctcaatgccgacctctttcgcgggaccctggagccggtggagaaggcgctgcgcgacgccaagctggacaagggccagatccaggagatcgtgctggtgggcggctccactcgtatccccaagatccagaagctgctgcaggatttcttcaacggcaaggagctgaacaagagcatcaaccccgacgaggcggtggcctatggcgccgcggtgcaggcggccatcctcatcggcgacaaatcagagaatgtgcaggacctgctgctactcgacgtgaccccgttgtcgctgggcatcgagacagctggcggtgtcatgaccccactcatcaagaggaacaccacgatccccaccaagcagacgcagaccttcaccacctactcggacaaccagagcagcgtactggtgcaggtatacgagggcgaacgggccatgaccaaggacaataacctgctgggcaagttcgacctgaccgggattccccctgcgcctcgcggggtcccccaaatcgaggttaccttcgacattgacgccaatggcatccttaacgttaccgccgccgacaagagcaccggtaaggaaaacaaaatcaccatcaccaatgacaaaggtcgtctgagcaaggacgacattgaccggatggtgcaggaggcggagcggtacaaatcggaagatgaggcgaatcgcgaccgagtcgcggccaaaaacgccctggagtcctatacctacaacatcaagcagacggtggaagacgagaaactgaggggcaagattagcgagcaggacaaaaacaagatcctcgacaagtgtcaggaggtgatcaactggctcgaccgaaaccagatggcagagaaagatgagtatgaacacaagcagaaagagctcgaaagagtttgcaaccccatcatcagcaaactttaccaaggtggtcctggcggcggcagcggcggcggcggttcaggagcctccgggggacccaccatcgaagaagtggactaagcttgcactcaagtcagcgtaaacctctttgcctttctctctctctctttttttttgtttgtttctttgaaatgtccttgtgccaagtacgagatctattgttggaagtctttggtatatgcaaatgaaaggagaggtgcaacaacttagtttaattataaaagttccaaagtttgttttttaaaaacattattcgaggtttctctttaatgcattttgcgtgtttgctgacttgagcatttttgattagttcgtgcatggagatttgtttgagatgagaaaccttaagtttgcacacctgttctgtagaagcttggaaacagtaaaatatataggagcttaaattgtttatttttatgtactactttaaaactaaactgaacattgcagtaatgttaaggacaggtatactttttgcaaacaaatgcataaatgcaaatgtaaagtaaagctgaaattgatctcaaaaaaaaaaaaaaaaaaaaaaaaaaaaaaaaaaa

SEQ ID NO: 92 - DNA, 787 bp, Homo sapiens
gaaaagacaagagagcattccgtgctatgattcaggcctaattaagtgattgcgtctgggcacggctataaaccactagctgcttcaactggtaatccagtcagtaggcaactgcaggggctcgccactgactgaaggcagtggaaggttggcagaaggaggctgttcaaggctgtttttgccttcactatggcaaaaatcattttgaggcacctcatagagattccagtgcgttaccaggaagagtttgaagctcgaggtctagaagactgcaggctggatcatgctttatatgcactgcctgggccaaccatcgtggacctgaggaaaaccagggcagcgcagtctcctccagtggactcagcggcagagacgccaccccgagaaggcaaatcccactttcagatcctgctggacgtggtccagttcctccctgaagacatcatcattcagaccttcgaaggctggctgctgataaaagcacaacacggaaccagaatggatgagcacggttttatctcaagaagcttcacccgacagtacaaactaccagatggtgtggaaatcaaagatttgtctgcagtcctctgtcatgatggaattttggtggtggaagtaaaggatccagttgggactaagtgacatcgtatcggttcctgttcagatgacatggggaagatgatggttcagccactggtactacgagaatgtttgtattacccacatttgaaatgatttgctatgatttttatgaagattaaaaatatatacacagttcctggtaaaa

SEQ ID NO: 93 - DNA, 6492 bp, Homo sapiens
tttctgtgaagcagaagtctgggaatcgatctggaaatcctcctaatttttactccctctccccgcgactcctgattcattgggaagtttcaaatcagctataactggagagtgctgaagattgatgggatcgttgccttatgcatttgttttggttttacaaaaaggaaacttgacagaggatcatgctgtacttaaaaaatacaacatcacagaggaagtagactgatattaacaatacttactaataataacgtgcctcatgaaataaagatccgaaaggaattggaataaaaatttcctgcatctcatgccaagggggaaacaccagaatcaagtgttccgcgtgattgaagacaccccctcgtccaagaatgcaaagcacatccaataaaatagctggattataactcctcttctttctctgggggccgtggggtgggagctggggcgagaggtgccgttggcccccgttgcttttcctctgggaaggatggcgcacgctgggagaacagggtacgataaccgggagatagtgatgaagtacatccattataagctgtcgcagaggggctacgagtgggatgcgggagatgtgggcgccgcgcccccgggggccgcccccgcaccgggcatcttctcctcccagcccgggcacacgccccatccagccgcatcccgggacccggtcgccaggacctcgccgctgcagaccccggctgcccccggcgccgccgcggggcctgcgctcagcccggtgccacctgtggtccacctgaccctccgccaggccggcgacgacttctcccgccgctaccgccgcgacttcgccgagatgtccagccagctgcacctgacgcccttcaccgcgcggggacgctttgccacggtggtggaggagctcttcagggacggggtgaactgggggaggattgtggccttctttgagttcggtggggtcatgtgtgtggagagcgtcaaccgggagatgtcgcccctggtggacaacatcgccctgtggatgactgagtacctgaaccggcacctgcacacctggatccaggataacggaggctgggatgcctttgtggaactgtacggccccagcatgcggcctctgtttgatttctcctggctgtctctgaagactctgctcagtttggccctggtgggagcttgcatcaccctgggtgcctatctgggccacaagtgaagtcaacatgcctgccccaaacaaatatgcaaaaggttcactaaagcagtagaaataatatgcattgtcagtgatgtaccatgaaacaaagctgcaggctgtttaagaaaaaataacacacatataaacatcacacacacagacagacacacacacacacaacaattaacagtcttcaggcaaaacgtcgaatcagctatttactgccaaagggaaatatcatttattttttacattattaagaaaaaaagatttatttatttaagacagtcccatcaaaactcctgtctttggaaatccgaccactaattgccaagcaccgcttcgtgtggctccacctggatgttctgtgcctgtaaacatagattcgctttccatgttgttggccggatcaccatctgaagagcagacggatggaaaaaggacctgatcattggggaagctggctttctggctgctggaggctggggagaaggtgttcattcacttgcatttctttgccctgggggctgtgatattaacagagggagggttcctgtggggggaagtccatgcctccctggcctgaagaagagactctttgcatatgactcacatgatgcatacctggtgggaggaaaagagttgggaacttcagatggacctagtacccactgagatttccacgccgaaggacagcgatgggaaaaatgcccttaaatcataggaaagtatttttttaagctaccaattgtgccgagaaaagcattttagcaatttatacaatatcatccagtaccttaagccctgattgtgtatattcatatattttggatacgcaccccccaactcccaatactggctctgtctgagtaagaaacagaatcctctggaacttgaggaagtgaacatttcggtgacttccgcatcaggaaggctagagttacccagagcatcaggccgccacaagtgcctgcttttaggagaccgaagtccgcagaacctgcctgtgtcccagcttggaggcctggtcctggaactgagccggggccctcactggcctcctccagggatgatcaacagggcagtgtggtctccgaatgtctggaagctgatggagctcagaattccactgtcaagaaagagcagtagaggggtgtggctgggcctgtcaccctggggccctccaggtaggcccgttttcacgtggagcatgggagccacgacccttcttaagacatgtatcactgtagagggaaggaacagaggccctgggcccttcctatcagaaggacatggtgaaggctgggaacgtgaggagaggcaatggccacggcccattttggctgtagcacatggcacgttggctgtgtggccttggcccacctgtgagtttaaagcaaggctttaaatgactttggagagggtcacaaatcctaaaagaagcattgaagtgaggtgtcatggattaattgacccctgtctatggaattacatgtaaaacattatcttgtcactgtagtttggttttatttgaaaacctgacaaaaaaaaagttccaggtgtggaatatgggggttatctgtacatcctggggcattaaaaaaaaaatcaatggtggggaactataaagaagtaacaaaagaagtgacatcttcagcaaataaactaggaaatttttttttcttccagtttagaatcagccttgaaacattgatggaataactctgtggcattattgcattatataccatttatctgtattaactttggaatgtactctgttcaatgtttaatgctgtggttgatatttcgaaagctgctttaaaaaaatacatgcatctcagcgtttttttgtttttaattgtatttagttatggcctatacactatttgtgagcaaaggtgatcgttttctgtttgagatttttatctcttgattcttcaaaagcattctgagaaggtgagataagccctgagtctcagctacctaagaaaaacctggatgtcactggccactgaggagctttgtttcaaccaagtcatgtgcatttccacgtcaacagaattgtttattgtgacagttatatctgttgtccctttgaccttgtttcttgaaggtttcctcgtccctgggcaattccgcatttaattcatggtattcaggattacatgcatgtttggttaaacccatgagattcattcagttaaaaatccagatggcaaatgaccagcagattcaaatctatggtggtttgacctttagagagttgctttacgtggcctgtttcaacacagacccacccagagccctcctgccctccttccgcgggggctttctcatggctgtccttcagggtcttcctgaaatgcagtggtgcttacgctccaccaagaaagcaggaaacctgtggtatgaagccagacctccccggcgggcctcagggaacagaatgatcagacctttgaatgattctaatttttaagcaaaatattattttatgaaaggtttacattgtcaaagtgatgaatatggaatatccaatcctgtgctgctatcctgccaaaatcattttaatggagtcagtttgcagtatgctccacgtggtaagatcctccaagctgctttagaagtaacaatgaagaacgtggacgtttttaatataaagcctgttttgtcttttgttgttgttcaaacgggattcacagagtatttgaaaaatgtatatatattaagaggtcacgggggctaattgctggctggctgccttttgctgtggggttttgttacctggttttaataacagtaaatgtgcccagcctcttggccccagaactgtacagtattgtggctgcacttgctctaagagtagttgatgttgcattttccttattgttaaaaacatgttagaagcaatgaatgtatataaaagcctcaactagtcatttttttctcctcttcttttttttcattatatctaattattttgcagttgggcaacagagaaccatccctattttgtattgaagagggattcacatctgcatcttaactgctctttatgaatgaaaaaacagtcctctgtatgtactcctctttacactggccagggtcagagttaaatagagtatatgcactttccaaattggggacaagggctctaaaaaaagccccaaaaggagaagaacatctgagaacctcctcggccctcccagtccctcgctgcacaaatactccgcaagagaggccagaatgacagctgacagggtctatggccatcgggtcgtctccgaagatttggcaggggcagaaaactctggcaggcttaagatttggaataaagtcacagaattaaggaagcacctcaatttagttcaaacaagacgccaacattctctccacagctcacttacctctctgtgttcagatgtggccttccatttatatgtgatctttgttttattagtaaatgcttatcatctaaagatgtagctctggcccagtgggaaaaattaggaagtgattataaatcgagaggagttataataatcaagattaaatgtaaataatcagggcaatcccaacacatgtctagctttcacctccaggatctattgagtgaacagaattgcaaatagtctctatttgtaattgaacttatcctaaaacaaatagtttataaatgtgaacttaaactctaattaattccaactgtacttttaaggcagtggctgtttttagactttcttatcacttatagttagtaatgtacacctactctatcagagaaaaacaggaaaggctcgaaatacaagccattctaaggaaattagggagtcagttgaaattctattctgatcttattctgtggtgtcttttgcagcccagacaaatgtggttacacactttttaagaaatacaattctacattgtcaagcttatgaaggttccaatcagatctttattgttattcaatttggatctttcagggattttttttttaaattattatgggacaaaggacatttgttggaggggtgggagggaggaagaatttttaaatgtaaaacattcccaagtttggatcagggagttggaagttttcagaataaccagaactaagggtatgaaggacctgtattggggtcgatgtgatgcctctgcgaagaaccttgtgtgacaaatgagaaacattttgaagtttgtggtacgacctttagattccagagacatcagcatggctcaaagtgcagctccgtttggcagtgcaatggtataaatttcaagctggatatgtctaatgggtatttaaacaataaatgtgcagttttaactaacaggatatttaatgacaaccttctggttggtagggacatctgtttctaaatgtttattatgtacaatacagaaaaaaattttataaaattaagcaatgtgaaactgaattggagagtgataatacaagtcctttagtcttacccagtgaatcattctgttccatgtctttggacaaccatgaccttggacaatcatgaaatatgcatctcactggatgcaaagaaaatcagatggagcatgaatggtactgtaccggttcatctggactgccccagaaaaataacttcaagcaaacatcctatcaacaacaaggttgttctgcataccaagctgagcacagaagatgggaacactggtggaggatggaaaggctcgctcaatcaagaaaattctgagactattaataaataagactgtagtgtagatactgagtaaatccatgcacctaaaccttttggaaaatctgccgtgggccctccagatagctcatttcattaagtttttccctccaaggtagaatttgcaagagtgacagtggattgcatttcttttggggaagctttcttttggtggttttgtttattataccttcttaagttttcaaccaaggtttgcttttgttttgagttactggggttatttttgttttaaataaaaataagtgtacaataagtgtttttgtattgaaagcttttgttatcaagattttcatacttttaccttccatggctctttttaagattgatacttttaagaggtggctgatattctgcaacactgtacacataaaaaatacggtaaggatactttacatggttaaggtaaagtaagtctccagttggccaccattagctataatggcactttgtttgtgttgttggaaaaagtcacattgccattaaactttccttgtctgtctagttaatattgtgaagaaaaataaagtacagtgtgagatactg

SEQ ID NO: 94 - DNA, 1207 bp, Homo sapiens
tttctgtgaagcagaagtctgggaatcgatctggaaatcctcctaatttttactccctctccccgcgactcctgattcattgggaagtttcaaatcagctataactggagagtgctgaagattgatgggatcgttgccttatgcatttgttttggttttacaaaaaggaaacttgacagaggatcatgctgtacttaaaaaatacaacatcacagaggaagtagactgatattaacaatacttactaataataacgtgcctcatgaaataaagatccgaaaggaattggaataaaaatttcctgcatctcatgccaagggggaaacaccagaatcaagtgttccgcgtgattgaagacaccccctcgtccaagaatgcaaagcacatccaataaaatagctggattataactcctcttctttctctgggggccgtggggtgggagctggggcgagaggtgccgttggcccccgttgcttttcctctgggaaggatggcgcacgctgggagaacagggtacgataaccgggagatagtgatgaagtacatccattataagctgtcgcagaggggctacgagtgggatgcgggagatgtgggcgccgcgcccccgggggccgcccccgcaccgggcatcttctcctcccagcccgggcacacgccccatccagccgcatcccgggacccggtcgccaggacctcgccgctgcagaccccggctgcccccggcgccgccgcggggcctgcgctcagcccggtgccacctgtggtccacctgaccctccgccaggccggcgacgacttctcccgccgctaccgccgcgacttcgccgagatgtccagccagctgcacctgacgcccttcaccgcgcggggacgctttgccacggtggtggaggagctcttcagggacggggtgaactgggggaggattgtggccttctttgagttcggtggggtcatgtgtgtggagagcgtcaaccgggagatgtcgcccctggtggacaacatcgccctgtggatgactgagtacctgaaccggcacctgcacacctggatccaggataacggaggctgggtaggtgcacttggtgatgtgagtctgggctgaggccacaggtccgagatgcgggggttggagtgcgggtgggctcctggggcaatgggaggctgtggagccggcgaaataaaatcagagttgttgcta

SEQ ID NO: 95 - DNA, 2386 bp, Homo sapiens
atgggcaacttgaagagcgtggcccaggagcctgggccaccctgcggcctggggctggggctgggccttgggctgtgcggcaagcagggcccagccaccccggcccctgagcccagccgggccccagcatccctactcccaccagcgccagaacacagccccccgagctccccgctaacccagcccccagaggggcccaagttccctcgtgtgaagaactgggaggtggggagcatcacctatgacaccctcagcgcccaggcgcagcaggatgggccctgcaccccaagacgctgcctgggctccctggtatttccacggaaactacagggccggccctcccccggccccccggcccctgagcagctgctgagtcaggcccgggacttcatcaaccagtactacagctccattaagaggagcggctcccaggcccacgaacagcggcttcaagaggtggaagccgaggtggcagccacaggcacctaccagcttagggagagcgagctggtgttcggggctaagcaggcctggcgcaacgctccccgctgcgtgggccggatccagtgggggaagctgcaggtgttcgatgcccgggactgcaggtctgcacaggaaatgttcacctacatctgcaaccacatcaagtatgccaccaaccggggcaaccttcgctcggccatcacagtgttcccgcagcgctgccctggccgaggagacttccgaatctggaacagccagctggtgcgctacgcgggctaccggcagcaggatggctctgtgcggggggacccagccaacgtggagatcaccgagctctgcattcagcacggctggaccccaggaaacggtcgcttcgacgtgctgcccctgctgctgcaggccccagatgatcccccagaactcttccttctgccccccgagctggtccttgaggtgcccctggagcaccccacgctggagtggtttgcagccctgggcctgcgctggtacgccctcccggcagtgtccaacatgctgctggaaattgggggcctggagttccccgcagcccccttcagtggctggtacatgagcactgagatcggcacgaggaacctgtgtgaccctcaccgctacaacatcctggaggatgtggctgtctgcatggacctggatacccggaccacctcgtccctgtggaaagacaaggcagcagtggaaatcaacgtggccgtgctgcacagttaccagctagccaaagtcaccatcgtggaccaccacgccgccacggcctctttcatgaagcacctggagaatgagcagaaggccagggggggctgccctgcagactgggcctggatcgtgccccccatctcgggcagcctcactcctgttttccatcaggagatggtcaactatttcctgtccccggccttccgctaccagccagacccctggaaggggagtgccgccaagggcaccggcatcaccaggaagaagacctttaaagaagtggccaacgccgtgaagatctccgcctcgctcatgggcacggtgatggcgaagcgagtgaaggcgacaatcctgtatggctccgagaccggccgggcccagagctacgcacagcagctggggagactcttccggaaggcttttgatccccgggtcctgtgtatggatgagtatgacgtggtgtccctcgaacacgagacgctggtgctggtggtaaccagcacatttgggaatggggatcccccggagaatggagagagatggggtttcgccatgttgcccaggctggtctctaactcctgggttcaagcaatccacctgcctcggcctcccaaagtgctgcgattatagacgtgagccactgcacctggccctcagtatcttaagcaagttggaatctcgtgaaaccctttttgctgccttagtgtccgtttcagccctcattctgacctaccttttcaagaaaaatagcaccagcaattgacttttttttagcataaaggtgtatagacacccatataacctacagccttcacaaggcatagcacattttcaccaccctggaaagttccctcatcagttcctcacgtgaatcccttcccagtctgtctccctgccagaagtgtctgtcaccacagaatagtttcgcctgctctagaacggcacctagatggaagcacgcagtgttgcggcgtctcctgctgaggctgtttttgaggcgcactcgtgttgctgcgtgactcagtatttcactcattctgctgctgagtgccgttcattgtgtgaatatccccagtttgtttacccattctcttgttggtgacacttgggctgtttccaggtcggggctattatgaataaacctgttatgaacattcttgtaaaaaaaaaa

SEQ ID NO: 96 - DNA, 4345 bp, Homo sapiens
actgaaactaggggcaaggagacgaagagaacatgaaagttaaactttaagatgaagaacaaagctgaacatactgatgcattggatctttggagaggatctcagaactcattgtacttaatttacaggctaaaaccttagaagaggaatttattatatcctacacaagactccagggaagcacatggccttggactgaaggctggcatctggaagctgtcagccaccagcaccttctgcagcaggaaaaggccagggctctgctggagcaggcagcagagtggacgcacagtaacatgggcaacttgaagagcgtggcccaggagcctgggccaccctgcggcctggggctggggctgggccttgggctgtgcggcaagcagggcccagccaccccggcccctgagcccagccgggccccagcatccctactcccaccagcgccagaacacagccccccgagctccccgctaacccagcccccagaggggcccaagttccctcgtgtgaagaactgggaggtggggagcatcacctatgacaccctcagcgcccaggcgcagcaggatgggccctgcaccccaagacgctgcctgggctccctggtatttccacggaaactacagggccggccctcccccggccccccggcccctgagcagctgctgagtcaggcccgggacttcatcaaccagtactacagctccattaagaggagcggctcccaggcccacgaacagcggcttcaagaggtggaagccgaggtggcagccacaggcacctaccagcttagggagagcgagctggtgttcggggctaagcaggcctggcgcaacgctccccgctgcgtgggccggatccagtgggggaagctgcaggtgttcgatgcccgggactgcaggtctgcacaggaaatgttcacctacatctgcaaccacatcaagtatgccaccaaccggggcaaccttcgctcggccatcacagtgttcccgcagcgctgccctggccgaggagacttccgaatctggaacagccagctggtgcgctacgcgggctaccggcagcaggatggctctgtgcggggggacccagccaacgtggagatcaccgagctctgcattcagcacggctggaccccaggaaacggtcgcttcgacgtgctgcccctgctgctgcaggccccagatgatcccccagaactcttccttctgccccccgagctggtccttgaggtgcccctggagcaccccacgctggagtggtttgcagccctgggcctgcgctggtacgccctcccggcagtgtccaacatgctgctggaaattgggggcctggagttccccgcagcccccttcagtggctggtacatgagcactgagatcggcacgaggaacctgtgtgaccctcaccgctacaacatcctggaggatgtggctgtctgcatggacctggatacccggaccacctcgtccctgtggaaagacaaggcagcagtggaaatcaacgtggccgtgctgcacagttaccagctagccaaagtcaccatcgtggaccaccacgccgccacggcctctttcatgaagcacctggagaatgagcagaaggccagggggggctgccctgcagactgggcctggatcgtgccccccatctcgggcagcctcactcctgttttccatcaggagatggtcaactatttcctgtccccggccttccgctaccagccagacccctggaaggggagtgccgccaagggcaccggcatcaccaggaagaagacctttaaagaagtggccaacgccgtgaagatctccgcctcgctcatgggcacggtgatggcgaagcgagtgaaggcgacaatcctgtatggctccgagaccggccgggcccagagctacgcacagcagctggggagactcttccggaaggcttttgatccccgggtcctgtgtatggatgagtatgacgtggtgtccctcgaacacgagacgctggtgctggtggtaaccagcacatttgggaatggggatcccccggagaatggagagagctttgcagctgccctgatggagatgtccggcccctacaacagctcccctcggccggaacagcacaagagttataagatccgcttcaacagcatctcctgctcagacccactggtgtcctcttggcggcggaagaggaaggagtccagtaacacagacagtgcaggggccctgggcaccctcaggttctgtgtgttcgggctcggctcccgggcatacccccacttctgcgcctttgctcgtgccgtggacacacggctggaggaactgggcggggagcggctgctgcagctgggccagggcgacgagctgtgcggccaggaggaggccttccgaggctgggcccaggctgccttccaggccgcctgtgagaccttctgtgtgggagaggatgccaaggccgccgcccgagacatcttcagccccaaacggagctggaagcgccagaggtaccggctgagcgcccaggccgagggcctgcagttgctgccaggtctgatccacgtgcacaggcggaagatgttccaggctacaatccgctcagtggaaaacctgcaaagcagcaagtccacgagggccaccatcctggtgcgcctggacaccggaggccaggaggggctgcagtaccagccgggggaccacataggtgtctgcccgcccaaccggcccggccttgtggaggcgctgctgagccgcgtggaggacccgccggcgcccactgagcccgtggcagtagagcagctggagaagggcagccctggtggccctccccccggctgggtgcgggacccccggctgcccccgtgcacgctgcgccaggctctcaccttcttcctggacatcacctccccacccagccctcagctcttgcggctgctcagcaccttggcagaagagcccagggaacagcaggagctggaggccctcagccaggatccccgacgctacgaggagtggaagtggttccgctgccccacgctgctggaggtgctggagcagttcccgtcggtggcgctgcctgccccactgctcctcacccagctgcctctgctccagccccggtactactcagtcagctcggcacccagcacccacccaggagagatccacctcactgtagctgtgctggcatacaggactcaggatgggctgggccccctgcactatggagtctgctccacgtggctaagccagctcaagcccggagaccctgtgccctgcttcatccggggggctccctccttccggctgccacccgatcccagcttgccctgcatcctggtgggtccaggcactggcattgcccccttccggggattctggcaggagcggctgcatgacattgagagcaaagggctgcagcccactcccatgactttggtgttcggctgccgatgctcccaacttgaccatctctaccgcgacgaggtgcagaacgcccagcagcgcggggtgtttggccgagtcctcaccgccttctcccgggaacctgacaaccccaagacctacgtgcaggacatcctgaggacggagctggctgcggaggtgcaccgcgtgctgtgcctcgagcggggccacatgtttgtctgcggcgatgttaccatggcaaccaacgtcctgcagaccgtgcagcgcatcctggcgacggagggcgacatggagctggacgaggccggcgacgtcatcggcgtgctgcgggatcagcaacgctaccacgaagacattttcgggctcacgctgcgcacccaggaggtgacaagccgcatacgcacccagagcttttccttgcaggagcgtcagttgcggggcgcagtgccctgggcgttcgaccctcccggctcagacaccaacagcccctgagagccgcctggctttcccttccagttccgggagagcggctgcccgactcaggtccgcccgaccaggatcagccccgctcctcccctcttgaggtggtgccttctcacatctgtccagaggctgcaaggattcagcattattcctccaggaaggagcaaaacgcctcttttccctctctaggcctgttgcctcgggcctgggtccgccttaatctggaaggcccctcccagcagcggtaccccagggcctactgccacccgcttcctgtttcttagtcgaatgttagattcctcttgcctctctcaggagtatcttacctgtaaagtctaatctctaaatcaagtatttattattgaagatttaccataagggactgtgccagatgttaggagaactactaaagtgcctaccccagctcatgtggattacaaaaaaaa

SEQ ID NO: 97 - DNA, 2546 bp, Homo sapiens
atgggcaacttgaagagcgtggcccaggagcctgggccaccctgcggcctggggctggggctgggccttgggctgtgcggcaagcagggcccagccaccccggcccctgagcccagccgggccccagcatccctactcccaccagcgccagaacacagccccccgagctccccgctaacccagcccccagaggggcccaagttccctcgtgtgaagaactgggaggtggggagcatcacctatgacaccctcagcgcccaggcgcagcaggatgggccctgcaccccaagacgctgcctgggctccctggtatttccacggaaactacagggccggccctcccccggccccccggcccctgagcagctgctgagtcaggcccgggacttcatcaaccagtactacagctccattaagaggagcggctcccaggcccacgaacagcggcttcaagaggtggaagccgaggtggcagccacaggcacctaccagcttagggagagcgagctggtgttcggggctaagcaggcctggcgcaacgctccccgctgcgtgggccggatccagtgggggaagctgcaggtgttcgatgcccgggactgcaggtctgcacaggaaatgttcacctacatctgcaaccacatcaagtatgccaccaaccggggcaaccttcgctcggccatcacagtgttcccgcagcgctgccctggccgaggagacttccgaatctggaacagccagctggtgcgctacgcgggctaccggcagcaggatggctctgtgcggggggacccagccaacgtggagatcaccgagctctgcattcagcacggctggaccccaggaaacggtcgcttcgacgtgctgcccctgctgctgcaggccccagatgatcccccagaactcttccttctgccccccgagctggtccttgaggtgcccctggagcaccccacgctggagtggtttgcagccctgggcctgcgctggtacgccctcccggcagtgtccaacatgctgctggaaattgggggcctggagttccccgcagcccccttcagtggctggtacatgagcactgagatcggcacgaggaacctgtgtgaccctcaccgctacaacatcctggaggatgtggctgtctgcatggacctggatacccggaccacctcgtccctgtggaaagacaaggcagcagtggaaatcaacgtggccgtgctgcacagttaccagctagccaaagtcaccatcgtggaccaccacgccgccacggcctctttcatgaagcacctggagaatgagcagaaggccagggggggctgccctgcagactgggcctggatcgtgccccccatctcgggcagcctcactcctgttttccatcaggagatggtcaactatttcctgtccccggccttccgctaccagccagacccctggaaggggagtgccgccaagggcaccggcatcaccaggaagaagacctttaaagaagtggccaacgccgtgaagatctccgcctcgctcatgggcacggtgatggcgaagcgagtgaaggcgacaatcctgtatggctccgagaccggccgggcccagagctacgcacagcagctggggagactcttccggaaggcttttgatccccgggtcctgtgtatggatgagtatgacgtggtgtccctcgaacacgagacgctggtgctggtggtaaccagcacatttgggaatggggatcccccggagaatggagagggtctcactttgtggcccaggctggagtgcagtagtacaatcacggctcactgcagcctcaacctcctagactcaagcaatcctcccacttcaacctcccaagtagttgggactacaggcgcatgccatgatgcctagctaatttttgtattttttatagagatggggtttcgccatgttgcccaggctggtctctaactcctgggttcaagcaatccacctgcctcggcctcccaaagtgctgcgattatagacgtgagccactgcacctggccctcagtatcttaagcaagttggaatctcgtgaaaccctttttgctgccttagtgtccgtttcagccctcattctgacctaccttttcaagaaaaatagcaccagcaattgacttttttttagcataaaggtgtatagacacccatataacctacagccttcacaaggcatagcacattttcaccaccctggaaagttccctcatcagttcctcacgtgaatcccttcccagtctgtctccctgccagaagtgtctgtcaccacagaatagtttcgcctgctctagaacggcacctagatggaagcacgcagtgttgcggcgtctcctgctgaggctgtttttgaggcgcactcgtgttgctgcgtgactcagtatttcactcattctgctgctgagtgccgttcattgtgtgaatatccccagtttgtttacccattctcttgttggtgacacttgggctgtttccaggtcggggctattatgaataaacctgttatgaacattcttgtaaaaaaaaaa

SEQ ID NO: 98 - DNA, 2040 bp, Homo sapiens
atgggcaacttgaagagcgtggcccaggagcctgggccaccctgcggcctggggctggggctgggccttgggctgtgcggcaagcagggcccagccaccccggcccctgagcccagccgggccccagcatccctactcccaccagcgccagaacacagccccccgagctccccgctaacccagcccccagaggggcccaagttccctcgtgtgaagaactgggaggtggggagcatcacctatgacaccctcagcgcccaggcgcagcaggatgggccctgcaccccaagacgctgcctgggctccctggtatttccacggaaactacagggccggccctcccccggccccccggcccctgagcagctgctgagtcaggcccgggacttcatcaaccagtactacagctccattaagaggagcggctcccaggcccacgaacagcggcttcaagaggtggaagccgaggtggcagccacaggcacctaccagcttagggagagcgagctggtgttcggggctaagcaggcctggcgcaacgctccccgctgcgtgggccggatccagtgggggaagctgcaggtgttcgatgcccgggactgcaggtctgcacaggaaatgttcacctacatctgcaaccacatcaagtatgccaccaaccggggcaaccttcgctcggccatcacagtgttcccgcagcgctgccctggccgaggagacttccgaatctggaacagccagctggtgcgctacgcgggctaccggcagcaggatggctctgtgcggggggacccagccaacgtggagatcaccgagctctgcattcagcacggctggaccccaggaaacggtcgcttcgacgtgctgcccctgctgctgcaggccccagatgatcccccagaactcttccttctgccccccgagctggtccttgaggtgcccctggagcaccccacgctggagtggtttgcagccctgggcctgcgctggtacgccctcccggcagtgtccaacatgctgctggaaattgggggcctggagttccccgcagcccccttcagtggctggtacatgagcactgagatcggcacgaggaacctgtgtgaccctcaccgctacaacatcctggaggatgtggctgtctgcatggacctggatacccggaccacctcgtccctgtggaaagacaaggcagcagtggaaatcaacgtggccgtgctgcacagttaccagctagccaaagtcaccatcgtggaccaccacgccgccacggcctctttcatgaagcacctggagaatgagcagaaggccagggggggctgccctgcagactgggcctggatcgtgccccccatctcgggcagcctcactcctgttttccatcaggagatggtcaactatttcctgtccccggccttccgctaccagccagacccctggaaggggagtgccgccaagggcaccggcatcaccaggaagaagacctttaaagaagtggccaacgccgtgaagatctccgcctcgctcatgggcacggtgatggcgaagcgagtgaaggcgacaatcctgtatggctccgagaccggccgggcccagagctacgcacagcagctggggagactcttccggaaggcttttgatccccgggtcctgtgtatggatgagtatgacgtggtgtccctcgaacacgagacgctggtgctggtggtaaccagcacatttgggaatggggatcccccggagaatggagagtctgtctccctgccagaagtgtctgtcaccacagaatagtttcgcctgctctagaacggcacctagatggaagcacgcagtgttgcggcgtctcctgctgaggctgtttttgaggcgcactcgtgttgctgcgtgactcagtatttcactcattctgctgctgagtgccgttcattgtgtgaatatccccagtttgtttacccattctcttgttggtgacacttgggctgtttccaggtcggggctattatgaataaacctgttatgaacattcttgtaaaaaaaaaa

SEQ ID NO: 99 - DNA, 12291 bp, Homo sapiens
ataaaagatgtatgctttggagcccagagcggctcttttaatgagggttgcgacgtctccctccccacacccataaaccagtcgggttggacgtcactgctaattcgtttcagtgatgataggataaaggagggacattaagaaataaattccccctcacgaccctcgctgagctcacggctcagtccctacatatttatgccgcgtttccagccgctgggtgaggagctacttagcgccgcggctcctccgaggggcggccgggcagcgagcagcggccgagcggacgggctcatgatgcctcagatctgatccgcatctaacaggctggcaatgaagatacccagagaatagttcacatctatcatgcgtcacttctagacacagccatcagacgcatctcctcccctttctgcctgaccttagggacacgtcccaccgcctctcttgacgtctgcctggtcaaccatcacttccttagagaataaggagagaggcggatgcaggaaatcatgccaccgacgggccaccagccatgagtgggtgacgctgagctgacgtcaaagacagagagggctgaagccttgtcagcacctgtcaccccggctcctgctctccgtgtagcctgaagcctggatcctcctggtgaaatcatcttggcctgatagcattgtgaggtcttcagacaggacccctcggaagctagttaccatggaggatcacatgttcggtgttcagcaaatccagcccaatgtcatttctgttcgtctcttcaagcgcaaagttgggggcctgggatttctggtgaaggagcgggtcagtaagccgcccgtgatcatctctgacctgattcgtgggggcgccgcagagcagagtggcctcatccaggccggagacatcattcttgcggtcaacggccggcccttggtggacctgagctatgacagcgccctggaggtactcagaggcattgcctctgagacccacgtggtcctcattctgaggggccctgaaggtttcaccacgcacctggagaccacctttacaggtgatgggacccccaagaccatccgggtgacacagcccctgggtccccccaccaaagccgtggatctgtcccaccagccaccggccggcaaagaacagcccctggcagtggatggggcctcgggtcccgggaatgggcctcagcatgcctacgatgatgggcaggaggctggctcactcccccatgccaacggcctggcccccaggcccccaggccaggaccccgcgaagaaagcaaccagagtcagcctccaaggcagaggggagaacaatgaactgctcaaggagatagagcctgtgctgagccttctcaccagtgggagcagaggggtcaagggaggggcacctgccaaggcagagatgaaagatatgggaatccaggtggacagagatttggacggcaagtcacacaaacctctgcccctcggcgtggagaacgaccgagtcttcaatgacctatgggggaagggcaatgtgcctgtcgtcctcaacaacccatattcagagaaggagcagccccccacctcaggaaaacagtcccccacaaagaatggcagcccctccaagtgtccacgcttcctcaaggtcaagaactgggagactgaggtggttctcactgacaccctccaccttaagagcacattggaaacgggatgcactgagtacatctgcatgggctccatcatgcatccttctcagcatgcaaggaggcctgaagacgtccgcacaaaaggacagctcttccctctcgccaaagagtttattgatcaatactattcatcaattaaaagatttggctccaaagcccacatggaaaggctggaagaggtgaacaaagagatcgacaccactagcacttaccagctcaaggacacagagctcatctatggggccaagcacgcctggcggaatgcctcgcgctgtgtgggcaggatccagtggtccaagctgcaggtattcgatgcccgtgactgcaccacggcccacgggatgttcaactacatctgtaaccatgtcaagtatgccaccaacaaagggaacctcaggtctgccatcaccatattcccccagaggacagacggcaagcacgacttccgagtctggaactcccagctcatccgctacgctggctacaagcagcctgacggctccaccctgggggacccagccaatgtgcagttcacagagatatgcatacagcagggctggaaaccgcctagaggccgcttcgatgtcctgccgctcctgcttcaggccaacggcaatgaccctgagctcttccagattcctccagagctggtgttggaagttcccatcaggcaccccaagtttgagtggttcaaggacctggggctgaagtggtacggcctccccgccgtgtccaacatgctcctagagattggcggcctggagttcagcgcctgtcccttcagtggctggtacatgggcacagagattggtgtccgcgactactgtgacaactcccgctacaatatcctggaggaagtggccaagaagatgaacttagacatgaggaagacgtcctccctgtggaaggaccaggcgctggtggagatcaatatcgcggttctctatagcttccagagtgacaaagtgaccattgttgaccatcactccgccaccgagtccttcattaagcacatggagaatgagtaccgctgccgggggggctgccctgccgactgggtgtggatcgtgccccccatgtccggaagcatcacccctgtgttccaccaggagatgctcaactaccggctcaccccctccttcgaataccagcctgatccctggaacacgcatgtctggaaaggcaccaacgggacccccacaaagcggcgagccattggcttcaagaagctagcagaagctgtcaagttctcggccaagctgatggggcaggctatggccaagagggtgaaagcgaccatcctctatgccacagagacaggcaaatcgcaagcttatgccaagaccttgtgtgagatcttcaaacacgcctttgatgccaaggtgatgtccatggaagaatatgacattgtgcacctggaacatgaaactctggtccttgtggtcaccagcacctttggcaatggagatccccctgagaatggggagaaattcggctgtgctttgatggaaatgaggcaccccaactctgtgcaggaagaaaggaagtacccggaacccttgcgtttctttccccgtaaagggcctcccctccccaatggtgacacagaagtccacggtctggctgcagcccgtgacagccagcacaggagctacaaggtccgattcaacagcgtctcctcctactctgactcccaaaaatcatcaggcgatgggcccgacctcagagacaactttgagagtgctggacccctggccaatgtgaggttctcagtttttggcctcggctcacgagcataccctcacttttgcgccttcggacacgctgtggacaccctcctggaagaactgggaggggagaggatcctgaagatgagggaaggggatgagctctgtgggcaggaagaggctttcaggacctgggccaagaaggtcttcaaggcagcctgtgatgtcttctgtgtgggagatgatgtcaacattgaaaaggccaacaattccctcatcagcaatgatcgcagctggaagagaaacaagttccgcctcacctttgtggccgaagctccagaactcacacaaggtctatccaatgtccacaaaaagcgagtctcagctgcccggctccttagccgtcaaaacctccagagccctaaatccagtcggtcaactatcttcgtgcgtctccacaccaacgggagccaggagctgcagtaccagcctggggaccacctgggtgtcttccctggcaaccacgaggacctcgtgaatgccctgatcgagcggctggaggacgcgccgcctgtcaaccagatggtgaaagtggaactgctggaggagcggaacacggctttaggtgtcatcagtaactggacagacgagctccgcctcccgccctgcaccatcttccaggccttcaagtactacctggacatcaccacgccaccaacgcctctgcagctgcagcagtttgcctccctagctaccagcgagaaggagaagcagcgtctgctggtcctcagcaagggtttgcaggagtacgaggaatggaaatggggcaagaaccccaccatcgtggaggtgctggaggagttcccatctatccagatgccggccaccctgctcctgacccagctgtccctgctgcagccccgctactattccatcagctcctccccagacatgtaccctgatgaagtgcacctcactgtggccatcgtttcctaccgcactcgagatggagaaggaccaattcaccacggcgtatgctcctcctggctcaaccggatacaggctgacgaactggtcccctgtttcgtgagaggagcacccagcttccacctgccccggaacccccaagtcccctgcatcctcgttggaccaggcaccggcattgcccctttccgaagcttctggcaacagcggcaatttgatatccaacacaaaggaatgaacccctgccccatggtcctggtcttcgggtgccggcaatccaagatagatcatatctacagggaagagaccctgcaggccaagaacaagggggtcttcagagagctgtacacggcttactcccgggagccagacaaaccaaagaagtacgtgcaggacatcctgcaggagcagctggcggagtctgtgtaccgagccctgaaggagcaagggggccacatatacgtctgtggggacgtcaccatggctgctgatgtcctcaaagccatccagcgcatcatgacccagcaggggaagctctcggcagaggacgccggcgtattcatcagccggatgagggatgacaaccgataccatgaggatatttttggagtcaccctgcgaacgtacgaagtgaccaaccgccttagatctgagtccattgccttcattgaagagagcaaaaaagacaccgatgaggttttcagctcctaactggaccctcttgcccagccggctgcaagttttgtaagcgcggacagacactgctgaacctttcctctgggaccccctgtggccctcgctctgcctcctgtccttgtcgctgtgccctggtttccctcctcgggcttctcgcccctcagtggtttcctcggccctcctgggtttactccttgagttttcctgctgcgatgcaatgcttttctaatctgcagtggctcttacaaaactctgttcccactccctctcttgccgacaagggcaactcacgggtgcatgaaaccactggaacatggccgtcgctgtgggggtttttttctctggggttcccctggaaaggctgcaggaactaggcacaagctctctgagccagtccctcagccactgaagtccccctttctccttttttatgatgacattttggttgtgcgtgcctgtgtgtgtgtgtgtgtgtgtgtgtgtgtgtgtgatgggccaggtctctgtccgtcctcttccctgcacaagtgtgtcgatcttagattgccactgctttcattgaagaccctcaatgccaagaaacgtgtccctggcccatattaatccctcgtgtgtccataattagggtccacgcccatgtacctgaaacatttggaagccccataattgttctagttagaaagggttcagggcatggggagaggagtgggaaattgattaaaggggctgtctcccaatgaaagaggcattcccagaatttgctgcatttagattttgataccagtgagcagagccctcatgtgacatgaacccatccaatggattgtgcaaatcccctccccaaacccacccataccagctagaatcacttgactttgccacatccattgactgaccccctcctccagcaatagcatccaaggggcctggaagttatgttgttcaaagaagcctggtggcaataaggatcttcccactttgccactggatgactttggatgggtcacttgtcctcagtttttcctagtcataatgtcatacgaacctaaagaatatgaatggattaaatgttaaagctttggtgcctggaaacaatatcaagtaacaatatgattattatttttttattcccccaaagcgggcttgctgcttcacccttggggatgaaataatggaagctggttaaagtggatgaggttggaaagagttgccataatgaggtcccacgtggcttcttcgataggagccacaacttggggtgggaagaacttgtccctcaggcttgttgccctctgcagttgatctccaaagttttaaacctgttaaattaattttgacaaataagttaccctcaactcagatcaaaaatgggcagccaagtcttcggtaggaattggagccggtgtaattcctccctaagaggcaacctgttgaatttactctctcagagtaaatggtgggaagggatccctttgtatacttttttaaatactacaaattagtgtcaggcagttcccagaaagagacaagaaatcctagtggcctcccagactgcagggtccccaaggatggaaagggaatgttctgctggttctaccctgtttgttgtgtcttgctatacagaaaaaccacatttcttttatatactgtacgtgggcatatcttgttgttcagtttgggtgtctgctaaagaggaagtgcactggccctctttgaaagggctttacagtgggggcaccaagaccccaaagggcccaggccaggagactgttaaagtgaaaaggcaatctatgactcaccttgctctgccatccctggcagcccccaccggtgtcctgttcctgccacatggagcttgacttcatgccagctataatctcccctgccttcctttaatcccaatttcccctgctcactcttccacagatataaagaacaaacacttagcatcccacactcaccccttctaatcctgaagggaagcccattctaaactcctttcctgcaaacccatttccagctcctagtagctttcctcccaaaggctttctttccaatcctttatagctttggagacgcctccccaattccccagggaaggaaactgttgtgtccaatccccattaaagacaaattgatcagtgcttcccactccaagtcaagctttatgcaggaatgcttttccatcagggaataaatacttagaagcgcttacaaggtgccaggcacctcctttctgcatgtgcctgcctttctagtagcagacagatggaaacattgtctcattttgtcaaggagtccaaagaaatgattataaaaccaggattcatccttcttctccagaaagatttttttttaagtaaacacctttcaatccccaacacaagctgcttcacaactccaggctagaaggcaggagagcgatctgatgtgtttctttcatttgccagaattcctgataccaaaagcctctctctctgttgagtaacctctcaaggaccagagtggagtccagattgttaggctcagatcaagggtggggaaatactgccctctcgtggtggcttttcatccaggcctcgtagccaaccgtttaagtgcaaaatagaattaagcaatgggtaagcaaaatagggttgacaagatatttgggggttattcgggttatggcccatttatttccctcttccccctgaattgaccagtagcagctccagccccatttcacaaaagtgagtttggccaggaggaatgagacgtctcctgaaataggaacaccggaacatcatgctcacctgccatcactatgcatccagttcccacagcttgtgtcgtgaaagagcagagagatgatgttaaactccttgggaggagagagggcttcttttggtttccctggagtgagacagccaggtgtctttcttttgcggggggacacttcagacccatcaatatggaattttgggagccgacctgagtgcaaatcctaattctgcccctgttggtgcagatggctgtgggcggctcacttgaccttttagagtctgcatacccacctgtataacaaggtggattgaatgagacaatgcccacgaaatgcccagttacagtacctggttcaaaacttactgcattttaatttttcacttaacttataacatgtcttgcttctccagtgtgtggaaggcaccgggcagtttgcagagataagcaaaacacagttcctctcgtgcagaaggttagaatctatttttttttttgacagagtcttgctctgtcacccaggctggcgtacagtggtacgatctcagctcactgcatcctctgcctcccccagttcaagtgattcttctgcctcggcctcctgagtaactgggactacaggcgcctaccaccacgcccagctaagttttgtatttttagtagagtcagggtttcaccatgttggccaggctggtcttgaattcctgacctcaaatgatccacgcacctcagcctcccaaagtgctggattacaggcatgagccaccacgcccagccaaaggttataatctgatggagagagacacccgtcttggaactgacataaatttctggggtttgagaaatgggcgggatttcactggtagcttctggaaggtaagagttgtccaggaattgggaagagtgagaggaaaggcacggacagggagcatgtaagataaattgaggctggctttggaaggctgaggagggtgagaaaaggtgggctgggaccagaccgtggggagaggtgagtggcattacaagaaatttaggctttattcagaaggcaacagggagtccctaagaatgtttttcaaaaagggacattaaggcgattggagttatacttggaaaagaaagttctggccacagtacagagcatggcccgttgagctgttgggggggttattgctgcaaccaaggcttgagtgagggaagaggcggatgtagtgataaagagactccaggaactgaatcagcgtacctggcaccccatccattgtagagggtgagaataaaggagaaattaaagcatcttgcaggctgggcgcggtagctcatgtctgtaatcccagcactttgggaggccgaggtgggtgtatcagttgaggtcaggagttggagaccagtcagccagttagtagaaaccctgactctactaagaaaatacaaaaattagctgggcatggtggcatgcgcctgtagtctcagctacctgggaggctgaggaaggaggatcgcttgagcccaggaggtggaggctgcagtgagccaagattgtaccactgcactccagcctgggtgacagagcaagactcttatctcaaaaaaaataaaataaaataaaataaaataaaacatcttgcccctagctgagagagaggtctctgaagagcaggctcagggaaaagatgagttttcagagctgatgtgatagtcagcttctctggagtcaacagggtgaatccttcccaagtccagccatgcccagatgcccggagggaaaactgacccccagccagtagacattggctaagaacacagaatcttctgaccaaacacgctttcagcagctgcctgctctggactttgaaagaggtcaggtcttgccctaagctcaaaacaagtgagaggtgtcctgacctagctcatagggcaaatggtcctaataggatgggcaatccagatgcctgagccccttcactccgacagcaccagcgcctaatgcagccttttcattcttgccattaggaaatctgtggacttctagcctgtgttttaaaccagccatgtttccttgtatatttccctacccgctgccccacatacccagcatgccgctgtggccaccatgtcctcaaagccttctgtctgtatcaggaatgtagtctgagactgccaggaagcaacaaggagagagaaacactaactagtcttcctttataacccattcatactctctggctgtccccaaccttcatagtctcctgcatccaaatgtcctctttggctcaaaaagtaggccaggcatggtggttcatgcctgtaatagcactttgggagactgaggtgggaggatcacttggggccaggagtttgagaccagcttgggcaacacagcgcaatctcgtctctactaaaaaaaaaaaaaaaaaaaaattagctgggcatgatggcatgctcctgtggtcccagctacttgggaggctgaggcaggaggatcacttggtcccaggagtttgaggcgacagtgagctaggatcgcaccactgcactccagcctgagtgacagagcaagaccctgtctctaaaaaaaattaaaatgaaagaccaggtgctgggattaaggaaacacaggtctgagggtctgagggaaggggcctgcctcccagggagtcaacatagatgttccccatgaacagggatttgactttggaggccaacctggcctggcctctgccctttatctcacactccctatccttggcccactgccagtccctgccttgtggcaaaggggccccaaaagaaaagctgcccttccccaaatgtaaggacccaggtacactttcacccgtggaaagcagtgtctgtcgagagtctgtttcctattaatacttatcaaagccatgtgcgagggaggtggtcagctgtcaatatgccttagtatgtttatatgagtttgttttgttctaaaatacccaaacagttctggtcaagcggggctatgcccgtctggcccaaaacacagtccgttattaacgagatggccctggcaggcgggaacaaatctgcctccatgcactgcttcctgtagtcttttagaaagtaactccaggacatcgaagtgcccagatttgactcctaagttctaggagactgtagcgcagggtctgtcaaccttagcactattggcatttggggctgggtaattctttcttgtgggggccgtcttgggtactgtaggaagctgagcagcattcctggcctccatccacaagatacctgtagcagtgtcctgccaacggtaacaatcaagtatgtcatcagacattgcccaatgtccccagggggcaacacccctctcttggacttcagggtcaagagaatctctgctggctaccccaggacttctcattatagatttcctggagcacgcagcagaaactttgcctagcccagtggttgtttccattatctgctgccaaagtgggatttgagggtgtccgggggagggggcatggggagggcagtatgctttcaaaaacccctcccaggccaggcgtggtggctcatgcctgtaatcacaggactttgggaggccgaggctggcagatcacttgaggctgggagttagagaccaacctggctaacatggcaaaacctcgtctctactaaaaatacaaaaatcagcccggcgtggtggcgggcatctgtaatcccatctactcgggaggctgaggcaggagaattacttgaacccaggaggcagaggctgcagtgagccgagatggcaccactgcactccagcttgttgacagaatgagaccctgtggaaaaaaaaaaaaaagccctcccatgccagaacagaggatggcagtctgtttcaataagacactgtgtccttggtgttggttctgattaagactcactgagatccagtgctcttgagctgggtctcagtcccctcccatgtcctgtgctctgccgccactgttttcattgttgtgttctcgttgtgattgttaagactcacactcctggctcagcagtggttttccagaaggcccaaagagcggtgccgggcaccccacgtcgcagtgtccgttccgggcttgggaagctggggaggtgggcagacctggtcgcatctcaccacacacacacacacacacacacacacacacgctgtcagaaactcggccgtcccccctacctctgagctctcaatgctgctaatctctgccaagtgtccctgtgctccagcaccttccttgaaggactgacgcccaccccacgctctttgcgaggttgtccaggctgtgtttgtcgcatgctcttcttctgtatagttctcatcttccaattttatgggattcaacaaaagcctattatgcttgtttgcattatggttacaatattaaaaagtggattcaaaaaaaa

SEQ ID NO: 100 - DNA, 12189 bp, Homo sapiens
ataaaagatgtatgctttggagcccagagcggctcttttaatgagggttgcgacgtctccctccccacacccataaaccagtcgggttggacgtcactgctaattcgtttcagtgatgataggataaaggagggacattaagaaataaattccccctcacgaccctcgctgagctcacggctcagtccctacatatttatgccgcgtttccagccgctgggtgaggagctacttagcgccgcggctcctccgaggggcggccgggcagcgagcagcggccgagcggacgggctcatgatgcctcagatctgatccgcatctaacaggctggcaatgaagatacccagagaatagttcacatctatcatgcgtcacttctagacacagccatcagacgcatctcctcccctttctgcctgaccttagggacacgtcccaccgcctctcttgacgtctgcctggtcaaccatcacttccttagagaataaggagagaggcggatgcaggaaatcatgccaccgacgggccaccagccatgagtgggtgacgctgagctgacgtcaaagacagagagggctgaagccttgtcagcacctgtcaccccggctcctgctctccgtgtagcctgaagcctggatcctcctggtgaaatcatcttggcctgatagcattgtgaggtcttcagacaggacccctcggaagctagttaccatggaggatcacatgttcggtgttcagcaaatccagcccaatgtcatttctgttcgtctcttcaagcgcaaagttgggggcctgggatttctggtgaaggagcgggtcagtaagccgcccgtgatcatctctgacctgattcgtgggggcgccgcagagcagagtggcctcatccaggccggagacatcattcttgcggtcaacggccggcccttggtggacctgagctatgacagcgccctggaggtactcagaggcattgcctctgagacccacgtggtcctcattctgaggggccctgaaggtttcaccacgcacctggagaccacctttacaggtgatgggacccccaagaccatccgggtgacacagcccctgggtccccccaccaaagccgtggatctgtcccaccagccaccggccggcaaagaacagcccctggcagtggatggggcctcgggtcccgggaatgggcctcagcatgcctacgatgatgggcaggaggctggctcactcccccatgccaacggcctggcccccaggcccccaggccaggaccccgcgaagaaagcaaccagagtcagcctccaaggcagaggggagaacaatgaactgctcaaggagatagagcctgtgctgagccttctcaccagtgggagcagaggggtcaagggaggggcacctgccaaggcagagatgaaagatatgggaatccaggtggacagagatttggacggcaagtcacacaaacctctgcccctcggcgtggagaacgaccgagtcttcaatgacctatgggggaagggcaatgtgcctgtcgtcctcaacaacccatattcagagaaggagcagccccccacctcaggaaaacagtcccccacaaagaatggcagcccctccaagtgtccacgcttcctcaaggtcaagaactgggagactgaggtggttctcactgacaccctccaccttaagagcacattggaaacgggatgcactgagtacatctgcatgggctccatcatgcatccttctcagcatgcaaggaggcctgaagacgtccgcacaaaaggacagctcttccctctcgccaaagagtttattgatcaatactattcatcaattaaaagatttggctccaaagcccacatggaaaggctggaagaggtgaacaaagagatcgacaccactagcacttaccagctcaaggacacagagctcatctatggggccaagcacgcctggcggaatgcctcgcgctgtgtgggcaggatccagtggtccaagctgcaggtattcgatgcccgtgactgcaccacggcccacgggatgttcaactacatctgtaaccatgtcaagtatgccaccaacaaagggaacctcaggtctgccatcaccatattcccccagaggacagacggcaagcacgacttccgagtctggaactcccagctcatccgctacgctggctacaagcagcctgacggctccaccctgggggacccagccaatgtgcagttcacagagatatgcatacagcagggctggaaaccgcctagaggccgcttcgatgtcctgccgctcctgcttcaggccaacggcaatgaccctgagctcttccagattcctccagagctggtgttggaagttcccatcaggcaccccaagtttgagtggttcaaggacctggggctgaagtggtacggcctccccgccgtgtccaacatgctcctagagattggcggcctggagttcagcgcctgtcccttcagtggctggtacatgggcacagagattggtgtccgcgactactgtgacaactcccgctacaatatcctggaggaagtggccaagaagatgaacttagacatgaggaagacgtcctccctgtggaaggaccaggcgctggtggagatcaatatcgcggttctctatagcttccagagtgacaaagtgaccattgttgaccatcactccgccaccgagtccttcattaagcacatggagaatgagtaccgctgccgggggggctgccctgccgactgggtgtggatcgtgccccccatgtccggaagcatcacccctgtgttccaccaggagatgctcaactaccggctcaccccctccttcgaataccagcctgatccctggaacacgcatgtctggaaaggcaccaacgggacccccacaaagcggcgagccattggcttcaagaagctagcagaagctgtcaagttctcggccaagctgatggggcaggctatggccaagagggtgaaagcgaccatcctctatgccacagagacaggcaaatcgcaagcttatgccaagaccttgtgtgagatcttcaaacacgcctttgatgccaaggtgatgtccatggaagaatatgacattgtgcacctggaacatgaaactctggtccttgtggtcaccagcacctttggcaatggagatccccctgagaatggggagaaattcggctgtgctttgatggaaatgaggcaccccaactctgtgcaggaagaaaggaagagctacaaggtccgattcaacagcgtctcctcctactctgactcccaaaaatcatcaggcgatgggcccgacctcagagacaactttgagagtgctggacccctggccaatgtgaggttctcagtttttggcctcggctcacgagcataccctcacttttgcgccttcggacacgctgtggacaccctcctggaagaactgggaggggagaggatcctgaagatgagggaaggggatgagctctgtgggcaggaagaggctttcaggacctgggccaagaaggtcttcaaggcagcctgtgatgtcttctgtgtgggagatgatgtcaacattgaaaaggccaacaattccctcatcagcaatgatcgcagctggaagagaaacaagttccgcctcacctttgtggccgaagctccagaactcacacaaggtctatccaatgtccacaaaaagcgagtctcagctgcccggctccttagccgtcaaaacctccagagccctaaatccagtcggtcaactatcttcgtgcgtctccacaccaacgggagccaggagctgcagtaccagcctggggaccacctgggtgtcttccctggcaaccacgaggacctcgtgaatgccctgatcgagcggctggaggacgcgccgcctgtcaaccagatggtgaaagtggaactgctggaggagcggaacacggctttaggtgtcatcagtaactggacagacgagctccgcctcccgccctgcaccatcttccaggccttcaagtactacctggacatcaccacgccaccaacgcctctgcagctgcagcagtttgcctccctagctaccagcgagaaggagaagcagcgtctgctggtcctcagcaagggtttgcaggagtacgaggaatggaaatggggcaagaaccccaccatcgtggaggtgctggaggagttcccatctatccagatgccggccaccctgctcctgacccagctgtccctgctgcagccccgctactattccatcagctcctccccagacatgtaccctgatgaagtgcacctcactgtggccatcgtttcctaccgcactcgagatggagaaggaccaattcaccacggcgtatgctcctcctggctcaaccggatacaggctgacgaactggtcccctgtttcgtgagaggagcacccagcttccacctgccccggaacccccaagtcccctgcatcctcgttggaccaggcaccggcattgcccctttccgaagcttctggcaacagcggcaatttgatatccaacacaaaggaatgaacccctgccccatggtcctggtcttcgggtgccggcaatccaagatagatcatatctacagggaagagaccctgcaggccaagaacaagggggtcttcagagagctgtacacggcttactcccgggagccagacaaaccaaagaagtacgtgcaggacatcctgcaggagcagctggcggagtctgtgtaccgagccctgaaggagcaagggggccacatatacgtctgtggggacgtcaccatggctgctgatgtcctcaaagccatccagcgcatcatgacccagcaggggaagctctcggcagaggacgccggcgtattcatcagccggatgagggatgacaaccgataccatgaggatatttttggagtcaccctgcgaacgtacgaagtgaccaaccgccttagatctgagtccattgccttcattgaagagagcaaaaaagacaccgatgaggttttcagctcctaactggaccctcttgcccagccggctgcaagttttgtaagcgcggacagacactgctgaacctttcctctgggaccccctgtggccctcgctctgcctcctgtccttgtcgctgtgccctggtttccctcctcgggcttctcgcccctcagtggtttcctcggccctcctgggtttactccttgagttttcctgctgcgatgcaatgcttttctaatctgcagtggctcttacaaaactctgttcccactccctctcttgccgacaagggcaactcacgggtgcatgaaaccactggaacatggccgtcgctgtgggggtttttttctctggggttcccctggaaaggctgcaggaactaggcacaagctctctgagccagtccctcagccactgaagtccccctttctccttttttatgatgacattttggttgtgcgtgcctgtgtgtgtgtgtgtgtgtgtgtgtgtgtgtgtgatgggccaggtctctgtccgtcctcttccctgcacaagtgtgtcgatcttagattgccactgctttcattgaagaccctcaatgccaagaaacgtgtccctggcccatattaatccctcgtgtgtccataattagggtccacgcccatgtacctgaaacatttggaagccccataattgttctagttagaaagggttcagggcatggggagaggagtgggaaattgattaaaggggctgtctcccaatgaaagaggcattcccagaatttgctgcatttagattttgataccagtgagcagagccctcatgtgacatgaacccatccaatggattgtgcaaatcccctccccaaacccacccataccagctagaatcacttgactttgccacatccattgactgaccccctcctccagcaatagcatccaaggggcctggaagttatgttgttcaaagaagcctggtggcaataaggatcttcccactttgccactggatgactttggatgggtcacttgtcctcagtttttcctagtcataatgtcatacgaacctaaagaatatgaatggattaaatgttaaagctttggtgcctggaaacaatatcaagtaacaatatgattattatttttttattcccccaaagcgggcttgctgcttcacccttggggatgaaataatggaagctggttaaagtggatgaggttggaaagagttgccataatgaggtcccacgtggcttcttcgataggagccacaacttggggtgggaagaacttgtccctcaggcttgttgccctctgcagttgatctccaaagttttaaacctgttaaattaattttgacaaataagttaccctcaactcagatcaaaaatgggcagccaagtcttcggtaggaattggagccggtgtaattcctccctaagaggcaacctgttgaatttactctctcagagtaaatggtgggaagggatccctttgtatacttttttaaatactacaaattagtgtcaggcagttcccagaaagagacaagaaatcctagtggcctcccagactgcagggtccccaaggatggaaagggaatgttctgctggttctaccctgtttgttgtgtcttgctatacagaaaaaccacatttcttttatatactgtacgtgggcatatcttgttgttcagtttgggtgtctgctaaagaggaagtgcactggccctctttgaaagggctttacagtgggggcaccaagaccccaaagggcccaggccaggagactgttaaagtgaaaaggcaatctatgactcaccttgctctgccatccctggcagcccccaccggtgtcctgttcctgccacatggagcttgacttcatgccagctataatctcccctgccttcctttaatcccaatttcccctgctcactcttccacagatataaagaacaaacacttagcatcccacactcaccccttctaatcctgaagggaagcccattctaaactcctttcctgcaaacccatttccagctcctagtagctttcctcccaaaggctttctttccaatcctttatagctttggagacgcctccccaattccccagggaaggaaactgttgtgtccaatccccattaaagacaaattgatcagtgcttcccactccaagtcaagctttatgcaggaatgcttttccatcagggaataaatacttagaagcgcttacaaggtgccaggcacctcctttctgcatgtgcctgcctttctagtagcagacagatggaaacattgtctcattttgtcaaggagtccaaagaaatgattataaaaccaggattcatccttcttctccagaaagatttttttttaagtaaacacctttcaatccccaacacaagctgcttcacaactccaggctagaaggcaggagagcgatctgatgtgtttctttcatttgccagaattcctgataccaaaagcctctctctctgttgagtaacctctcaaggaccagagtggagtccagattgttaggctcagatcaagggtggggaaatactgccctctcgtggtggcttttcatccaggcctcgtagccaaccgtttaagtgcaaaatagaattaagcaatgggtaagcaaaatagggttgacaagatatttgggggttattcgggttatggcccatttatttccctcttccccctgaattgaccagtagcagctccagccccatttcacaaaagtgagtttggccaggaggaatgagacgtctcctgaaataggaacaccggaacatcatgctcacctgccatcactatgcatccagttcccacagcttgtgtcgtgaaagagcagagagatgatgttaaactccttgggaggagagagggcttcttttggtttccctggagtgagacagccaggtgtctttcttttgcggggggacacttcagacccatcaatatggaattttgggagccgacctgagtgcaaatcctaattctgcccctgttggtgcagatggctgtgggcggctcacttgaccttttagagtctgcatacccacctgtataacaaggtggattgaatgagacaatgcccacgaaatgcccagttacagtacctggttcaaaacttactgcattttaatttttcacttaacttataacatgtcttgcttctccagtgtgtggaaggcaccgggcagtttgcagagataagcaaaacacagttcctctcgtgcagaaggttagaatctatttttttttttgacagagtcttgctctgtcacccaggctggcgtacagtggtacgatctcagctcactgcatcctctgcctcccccagttcaagtgattcttctgcctcggcctcctgagtaactgggactacaggcgcctaccaccacgcccagctaagttttgtatttttagtagagtcagggtttcaccatgttggccaggctggtcttgaattcctgacctcaaatgatccacgcacctcagcctcccaaagtgctggattacaggcatgagccaccacgcccagccaaaggttataatctgatggagagagacacccgtcttggaactgacataaatttctggggtttgagaaatgggcgggatttcactggtagcttctggaaggtaagagttgtccaggaattgggaagagtgagaggaaaggcacggacagggagcatgtaagataaattgaggctggctttggaaggctgaggagggtgagaaaaggtgggctgggaccagaccgtggggagaggtgagtggcattacaagaaatttaggctttattcagaaggcaacagggagtccctaagaatgtttttcaaaaagggacattaaggcgattggagttatacttggaaaagaaagttctggccacagtacagagcatggcccgttgagctgttgggggggttattgctgcaaccaaggcttgagtgagggaagaggcggatgtagtgataaagagactccaggaactgaatcagcgtacctggcaccccatccattgtagagggtgagaataaaggagaaattaaagcatcttgcaggctgggcgcggtagctcatgtctgtaatcccagcactttgggaggccgaggtgggtgtatcagttgaggtcaggagttggagaccagtcagccagttagtagaaaccctgactctactaagaaaatacaaaaattagctgggcatggtggcatgcgcctgtagtctcagctacctgggaggctgaggaaggaggatcgcttgagcccaggaggtggaggctgcagtgagccaagattgtaccactgcactccagcctgggtgacagagcaagactcttatctcaaaaaaaataaaataaaataaaataaaataaaacatcttgcccctagctgagagagaggtctctgaagagcaggctcagggaaaagatgagttttcagagctgatgtgatagtcagcttctctggagtcaacagggtgaatccttcccaagtccagccatgcccagatgcccggagggaaaactgacccccagccagtagacattggctaagaacacagaatcttctgaccaaacacgctttcagcagctgcctgctctggactttgaaagaggtcaggtcttgccctaagctcaaaacaagtgagaggtgtcctgacctagctcatagggcaaatggtcctaataggatgggcaatccagatgcctgagccccttcactccgacagcaccagcgcctaatgcagccttttcattcttgccattaggaaatctgtggacttctagcctgtgttttaaaccagccatgtttccttgtatatttccctacccgctgccccacatacccagcatgccgctgtggccaccatgtcctcaaagccttctgtctgtatcaggaatgtagtctgagactgccaggaagcaacaaggagagagaaacactaactagtcttcctttataacccattcatactctctggctgtccccaaccttcatagtctcctgcatccaaatgtcctctttggctcaaaaagtaggccaggcatggtggttcatgcctgtaatagcactttgggagactgaggtgggaggatcacttggggccaggagtttgagaccagcttgggcaacacagcgcaatctcgtctctactaaaaaaaaaaaaaaaaaaaaattagctgggcatgatggcatgctcctgtggtcccagctacttgggaggctgaggcaggaggatcacttggtcccaggagtttgaggcgacagtgagctaggatcgcaccactgcactccagcctgagtgacagagcaagaccctgtctctaaaaaaaattaaaatgaaagaccaggtgctgggattaaggaaacacaggtctgagggtctgagggaaggggcctgcctcccagggagtcaacatagatgttccccatgaacagggatttgactttggaggccaacctggcctggcctctgccctttatctcacactccctatccttggcccactgccagtccctgccttgtggcaaaggggccccaaaagaaaagctgcccttccccaaatgtaaggacccaggtacactttcacccgtggaaagcagtgtctgtcgagagtctgtttcctattaatacttatcaaagccatgtgcgagggaggtggtcagctgtcaatatgccttagtatgtttatatgagtttgttttgttctaaaatacccaaacagttctggtcaagcggggctatgcccgtctggcccaaaacacagtccgttattaacgagatggccctggcaggcgggaacaaatctgcctccatgcactgcttcctgtagtcttttagaaagtaactccaggacatcgaagtgcccagatttgactcctaagttctaggagactgtagcgcagggtctgtcaaccttagcactattggcatttggggctgggtaattctttcttgtgggggccgtcttgggtactgtaggaagctgagcagcattcctggcctccatccacaagatacctgtagcagtgtcctgccaacggtaacaatcaagtatgtcatcagacattgcccaatgtccccagggggcaacacccctctcttggacttcagggtcaagagaatctctgctggctaccccaggacttctcattatagatttcctggagcacgcagcagaaactttgcctagcccagtggttgtttccattatctgctgccaaagtgggatttgagggtgtccgggggagggggcatggggagggcagtatgctttcaaaaacccctcccaggccaggcgtggtggctcatgcctgtaatcacaggactttgggaggccgaggctggcagatcacttgaggctgggagttagagaccaacctggctaacatggcaaaacctcgtctctactaaaaatacaaaaatcagcccggcgtggtggcgggcatctgtaatcccatctactcgggaggctgaggcaggagaattacttgaacccaggaggcagaggctgcagtgagccgagatggcaccactgcactccagcttgttgacagaatgagaccctgtggaaaaaaaaaaaaaagccctcccatgccagaacagaggatggcagtctgtttcaataagacactgtgtccttggtgttggttctgattaagactcactgagatccagtgctcttgagctgggtctcagtcccctcccatgtcctgtgctctgccgccactgttttcattgttgtgttctcgttgtgattgttaagactcacactcctggctcagcagtggttttccagaaggcccaaagagcggtgccgggcaccccacgtcgcagtgtccgttccgggcttgggaagctggggaggtgggcagacctggtcgcatctcaccacacacacacacacacacacacacacacacgctgtcagaaactcggccgtcccccctacctctgagctctcaatgctgctaatctctgccaagtgtccctgtgctccagcaccttccttgaaggactgacgcccaccccacgctctttgcgaggttgtccaggctgtgtttgtcgcatgctcttcttctgtatagttctcatcttccaattttatgggattcaacaaaagcctattatgcttgtttgcattatggttacaatattaaaaagtggattcaaaaaaaa

SEQ ID NO: 101 - DNA, 10776 bp, Homo sapiens
cggggaggatgagacattctagagccttggtggtaactgctttccttagccgctgatggctggccaggaagataaggacatcagggattctgtgatgaggaaactgagaatcacagagggttttggtgctcaacgagggtcacataaccaccccccacctcaggaaaacagtcccccacaaagaatggcagcccctccaagtgtccacgcttcctcaaggtcaagaactgggagactgaggtggttctcactgacaccctccaccttaagagcacattggaaacgggatgcactgagtacatctgcatgggctccatcatgcatccttctcagcatgcaaggaggcctgaagacgtccgcacaaaaggacagctcttccctctcgccaaagagtttattgatcaatactattcatcaattaaaagatttggctccaaagcccacatggaaaggctggaagaggtgaacaaagagatcgacaccactagcacttaccagctcaaggacacagagctcatctatggggccaagcacgcctggcggaatgcctcgcgctgtgtgggcaggatccagtggtccaagctgcaggtattcgatgcccgtgactgcaccacggcccacgggatgttcaactacatctgtaaccatgtcaagtatgccaccaacaaagggaacctcaggtctgccatcaccatattcccccagaggacagacggcaagcacgacttccgagtctggaactcccagctcatccgctacgctggctacaagcagcctgacggctccaccctgggggacccagccaatgtgcagttcacagagatatgcatacagcagggctggaaaccgcctagaggccgcttcgatgtcctgccgctcctgcttcaggccaacggcaatgaccctgagctcttccagattcctccagagctggtgttggaagttcccatcaggcaccccaagtttgagtggttcaaggacctggggctgaagtggtacggcctccccgccgtgtccaacatgctcctagagattggcggcctggagttcagcgcctgtcccttcagtggctggtacatgggcacagagattggtgtccgcgactactgtgacaactcccgctacaatatcctggaggaagtggccaagaagatgaacttagacatgaggaagacgtcctccctgtggaaggaccaggcgctggtggagatcaatatcgcggttctctatagcttccagagtgacaaagtgaccattgttgaccatcactccgccaccgagtccttcattaagcacatggagaatgagtaccgctgccgggggggctgccctgccgactgggtgtggatcgtgccccccatgtccggaagcatcacccctgtgttccaccaggagatgctcaactaccggctcaccccctccttcgaataccagcctgatccctggaacacgcatgtctggaaaggcaccaacgggacccccacaaagcggcgagccattggcttcaagaagctagcagaagctgtcaagttctcggccaagctgatggggcaggctatggccaagagggtgaaagcgaccatcctctatgccacagagacaggcaaatcgcaagcttatgccaagaccttgtgtgagatcttcaaacacgcctttgatgccaaggtgatgtccatggaagaatatgacattgtgcacctggaacatgaaactctggtccttgtggtcaccagcacctttggcaatggagatccccctgagaatggggagaaattcggctgtgctttgatggaaatgaggcaccccaactctgtgcaggaagaaaggaagagctacaaggtccgattcaacagcgtctcctcctactctgactcccaaaaatcatcaggcgatgggcccgacctcagagacaactttgagagtgctggacccctggccaatgtgaggttctcagtttttggcctcggctcacgagcataccctcacttttgcgccttcggacacgctgtggacaccctcctggaagaactgggaggggagaggatcctgaagatgagggaaggggatgagctctgtgggcaggaagaggctttcaggacctgggccaagaaggtcttcaaggcagcctgtgatgtcttctgtgtgggagatgatgtcaacattgaaaaggccaacaattccctcatcagcaatgatcgcagctggaagagaaacaagttccgcctcacctttgtggccgaagctccagaactcacacaaggtctatccaatgtccacaaaaagcgagtctcagctgcccggctccttagccgtcaaaacctccagagccctaaatccagtcggtcaactatcttcgtgcgtctccacaccaacgggagccaggagctgcagtaccagcctggggaccacctgggtgtcttccctggcaaccacgaggacctcgtgaatgccctgatcgagcggctggaggacgcgccgcctgtcaaccagatggtgaaagtggaactgctggaggagcggaacacggctttaggtgtcatcagtaactggacagacgagctccgcctcccgccctgcaccatcttccaggccttcaagtactacctggacatcaccacgccaccaacgcctctgcagctgcagcagtttgcctccctagctaccagcgagaaggagaagcagcgtctgctggtcctcagcaagggtttgcaggagtacgaggaatggaaatggggcaagaaccccaccatcgtggaggtgctggaggagttcccatctatccagatgccggccaccctgctcctgacccagctgtccctgctgcagccccgctactattccatcagctcctccccagacatgtaccctgatgaagtgcacctcactgtggccatcgtttcctaccgcactcgagatggagaaggaccaattcaccacggcgtatgctcctcctggctcaaccggatacaggctgacgaactggtcccctgtttcgtgagaggagcacccagcttccacctgccccggaacccccaagtcccctgcatcctcgttggaccaggcaccggcattgcccctttccgaagcttctggcaacagcggcaatttgatatccaacacaaaggaatgaacccctgccccatggtcctggtcttcgggtgccggcaatccaagatagatcatatctacagggaagagaccctgcaggccaagaacaagggggtcttcagagagctgtacacggcttactcccgggagccagacaaaccaaagaagtacgtgcaggacatcctgcaggagcagctggcggagtctgtgtaccgagccctgaaggagcaagggggccacatatacgtctgtggggacgtcaccatggctgctgatgtcctcaaagccatccagcgcatcatgacccagcaggggaagctctcggcagaggacgccggcgtattcatcagccggatgagggatgacaaccgataccatgaggatatttttggagtcaccctgcgaacgtacgaagtgaccaaccgccttagatctgagtccattgccttcattgaagagagcaaaaaagacaccgatgaggttttcagctcctaactggaccctcttgcccagccggctgcaagttttgtaagcgcggacagacactgctgaacctttcctctgggaccccctgtggccctcgctctgcctcctgtccttgtcgctgtgccctggtttccctcctcgggcttctcgcccctcagtggtttcctcggccctcctgggtttactccttgagttttcctgctgcgatgcaatgcttttctaatctgcagtggctcttacaaaactctgttcccactccctctcttgccgacaagggcaactcacgggtgcatgaaaccactggaacatggccgtcgctgtgggggtttttttctctggggttcccctggaaaggctgcaggaactaggcacaagctctctgagccagtccctcagccactgaagtccccctttctccttttttatgatgacattttggttgtgcgtgcctgtgtgtgtgtgtgtgtgtgtgtgtgtgtgtgtgatgggccaggtctctgtccgtcctcttccctgcacaagtgtgtcgatcttagattgccactgctttcattgaagaccctcaatgccaagaaacgtgtccctggcccatattaatccctcgtgtgtccataattagggtccacgcccatgtacctgaaacatttggaagccccataattgttctagttagaaagggttcagggcatggggagaggagtgggaaattgattaaaggggctgtctcccaatgaaagaggcattcccagaatttgctgcatttagattttgataccagtgagcagagccctcatgtgacatgaacccatccaatggattgtgcaaatcccctccccaaacccacccataccagctagaatcacttgactttgccacatccattgactgaccccctcctccagcaatagcatccaaggggcctggaagttatgttgttcaaagaagcctggtggcaataaggatcttcccactttgccactggatgactttggatgggtcacttgtcctcagtttttcctagtcataatgtcatacgaacctaaagaatatgaatggattaaatgttaaagctttggtgcctggaaacaatatcaagtaacaatatgattattatttttttattcccccaaagcgggcttgctgcttcacccttggggatgaaataatggaagctggttaaagtggatgaggttggaaagagttgccataatgaggtcccacgtggcttcttcgataggagccacaacttggggtgggaagaacttgtccctcaggcttgttgccctctgcagttgatctccaaagttttaaacctgttaaattaattttgacaaataagttaccctcaactcagatcaaaaatgggcagccaagtcttcggtaggaattggagccggtgtaattcctccctaagaggcaacctgttgaatttactctctcagagtaaatggtgggaagggatccctttgtatacttttttaaatactacaaattagtgtcaggcagttcccagaaagagacaagaaatcctagtggcctcccagactgcagggtccccaaggatggaaagggaatgttctgctggttctaccctgtttgttgtgtcttgctatacagaaaaaccacatttcttttatatactgtacgtgggcatatcttgttgttcagtttgggtgtctgctaaagaggaagtgcactggccctctttgaaagggctttacagtgggggcaccaagaccccaaagggcccaggccaggagactgttaaagtgaaaaggcaatctatgactcaccttgctctgccatccctggcagcccccaccggtgtcctgttcctgccacatggagcttgacttcatgccagctataatctcccctgccttcctttaatcccaatttcccctgctcactcttccacagatataaagaacaaacacttagcatcccacactcaccccttctaatcctgaagggaagcccattctaaactcctttcctgcaaacccatttccagctcctagtagctttcctcccaaaggctttctttccaatcctttatagctttggagacgcctccccaattccccagggaaggaaactgttgtgtccaatccccattaaagacaaattgatcagtgcttcccactccaagtcaagctttatgcaggaatgcttttccatcagggaataaatacttagaagcgcttacaaggtgccaggcacctcctttctgcatgtgcctgcctttctagtagcagacagatggaaacattgtctcattttgtcaaggagtccaaagaaatgattataaaaccaggattcatccttcttctccagaaagatttttttttaagtaaacacctttcaatccccaacacaagctgcttcacaactccaggctagaaggcaggagagcgatctgatgtgtttctttcatttgccagaattcctgataccaaaagcctctctctctgttgagtaacctctcaaggaccagagtggagtccagattgttaggctcagatcaagggtggggaaatactgccctctcgtggtggcttttcatccaggcctcgtagccaaccgtttaagtgcaaaatagaattaagcaatgggtaagcaaaatagggttgacaagatatttgggggttattcgggttatggcccatttatttccctcttccccctgaattgaccagtagcagctccagccccatttcacaaaagtgagtttggccaggaggaatgagacgtctcctgaaataggaacaccggaacatcatgctcacctgccatcactatgcatccagttcccacagcttgtgtcgtgaaagagcagagagatgatgttaaactccttgggaggagagagggcttcttttggtttccctggagtgagacagccaggtgtctttcttttgcggggggacacttcagacccatcaatatggaattttgggagccgacctgagtgcaaatcctaattctgcccctgttggtgcagatggctgtgggcggctcacttgaccttttagagtctgcatacccacctgtataacaaggtggattgaatgagacaatgcccacgaaatgcccagttacagtacctggttcaaaacttactgcattttaatttttcacttaacttataacatgtcttgcttctccagtgtgtggaaggcaccgggcagtttgcagagataagcaaaacacagttcctctcgtgcagaaggttagaatctatttttttttttgacagagtcttgctctgtcacccaggctggcgtacagtggtacgatctcagctcactgcatcctctgcctcccccagttcaagtgattcttctgcctcggcctcctgagtaactgggactacaggcgcctaccaccacgcccagctaagttttgtatttttagtagagtcagggtttcaccatgttggccaggctggtcttgaattcctgacctcaaatgatccacgcacctcagcctcccaaagtgctggattacaggcatgagccaccacgcccagccaaaggttataatctgatggagagagacacccgtcttggaactgacataaatttctggggtttgagaaatgggcgggatttcactggtagcttctggaaggtaagagttgtccaggaattgggaagagtgagaggaaaggcacggacagggagcatgtaagataaattgaggctggctttggaaggctgaggagggtgagaaaaggtgggctgggaccagaccgtggggagaggtgagtggcattacaagaaatttaggctttattcagaaggcaacagggagtccctaagaatgtttttcaaaaagggacattaaggcgattggagttatacttggaaaagaaagttctggccacagtacagagcatggcccgttgagctgttgggggggttattgctgcaaccaaggcttgagtgagggaagaggcggatgtagtgataaagagactccaggaactgaatcagcgtacctggcaccccatccattgtagagggtgagaataaaggagaaattaaagcatcttgcaggctgggcgcggtagctcatgtctgtaatcccagcactttgggaggccgaggtgggtgtatcagttgaggtcaggagttggagaccagtcagccagttagtagaaaccctgactctactaagaaaatacaaaaattagctgggcatggtggcatgcgcctgtagtctcagctacctgggaggctgaggaaggaggatcgcttgagcccaggaggtggaggctgcagtgagccaagattgtaccactgcactccagcctgggtgacagagcaagactcttatctcaaaaaaaataaaataaaataaaataaaataaaacatcttgcccctagctgagagagaggtctctgaagagcaggctcagggaaaagatgagttttcagagctgatgtgatagtcagcttctctggagtcaacagggtgaatccttcccaagtccagccatgcccagatgcccggagggaaaactgacccccagccagtagacattggctaagaacacagaatcttctgaccaaacacgctttcagcagctgcctgctctggactttgaaagaggtcaggtcttgccctaagctcaaaacaagtgagaggtgtcctgacctagctcatagggcaaatggtcctaataggatgggcaatccagatgcctgagccccttcactccgacagcaccagcgcctaatgcagccttttcattcttgccattaggaaatctgtggacttctagcctgtgttttaaaccagccatgtttccttgtatatttccctacccgctgccccacatacccagcatgccgctgtggccaccatgtcctcaaagccttctgtctgtatcaggaatgtagtctgagactgccaggaagcaacaaggagagagaaacactaactagtcttcctttataacccattcatactctctggctgtccccaaccttcatagtctcctgcatccaaatgtcctctttggctcaaaaagtaggccaggcatggtggttcatgcctgtaatagcactttgggagactgaggtgggaggatcacttggggccaggagtttgagaccagcttgggcaacacagcgcaatctcgtctctactaaaaaaaaaaaaaaaaaaaaattagctgggcatgatggcatgctcctgtggtcccagctacttgggaggctgaggcaggaggatcacttggtcccaggagtttgaggcgacagtgagctaggatcgcaccactgcactccagcctgagtgacagagcaagaccctgtctctaaaaaaaattaaaatgaaagaccaggtgctgggattaaggaaacacaggtctgagggtctgagggaaggggcctgcctcccagggagtcaacatagatgttccccatgaacagggatttgactttggaggccaacctggcctggcctctgccctttatctcacactccctatccttggcccactgccagtccctgccttgtggcaaaggggccccaaaagaaaagctgcccttccccaaatgtaaggacccaggtacactttcacccgtggaaagcagtgtctgtcgagagtctgtttcctattaatacttatcaaagccatgtgcgagggaggtggtcagctgtcaatatgccttagtatgtttatatgagtttgttttgttctaaaatacccaaacagttctggtcaagcggggctatgcccgtctggcccaaaacacagtccgttattaacgagatggccctggcaggcgggaacaaatctgcctccatgcactgcttcctgtagtcttttagaaagtaactccaggacatcgaagtgcccagatttgactcctaagttctaggagactgtagcgcagggtctgtcaaccttagcactattggcatttggggctgggtaattctttcttgtgggggccgtcttgggtactgtaggaagctgagcagcattcctggcctccatccacaagatacctgtagcagtgtcctgccaacggtaacaatcaagtatgtcatcagacattgcccaatgtccccagggggcaacacccctctcttggacttcagggtcaagagaatctctgctggctaccccaggacttctcattatagatttcctggagcacgcagcagaaactttgcctagcccagtggttgtttccattatctgctgccaaagtgggatttgagggtgtccgggggagggggcatggggagggcagtatgctttcaaaaacccctcccaggccaggcgtggtggctcatgcctgtaatcacaggactttgggaggccgaggctggcagatcacttgaggctgggagttagagaccaacctggctaacatggcaaaacctcgtctctactaaaaatacaaaaatcagcccggcgtggtggcgggcatctgtaatcccatctactcgggaggctgaggcaggagaattacttgaacccaggaggcagaggctgcagtgagccgagatggcaccactgcactccagcttgttgacagaatgagaccctgtggaaaaaaaaaaaaaagccctcccatgccagaacagaggatggcagtctgtttcaataagacactgtgtccttggtgttggttctgattaagactcactgagatccagtgctcttgagctgggtctcagtcccctcccatgtcctgtgctctgccgccactgttttcattgttgtgttctcgttgtgattgttaagactcacactcctggctcagcagtggttttccagaaggcccaaagagcggtgccgggcaccccacgtcgcagtgtccgttccgggcttgggaagctggggaggtgggcagacctggtcgcatctcaccacacacacacacacacacacacacacacacgctgtcagaaactcggccgtcccccctacctctgagctctcaatgctgctaatctctgccaagtgtccctgtgctccagcaccttccttgaaggactgacgcccaccccacgctctttgcgaggttgtccaggctgtgtttgtcgcatgctcttcttctgtatagttctcatcttccaattttatgggattcaacaaaagcctattatgcttgtttgcattatggttacaatattaaaaagtggattcaaaaaaaa

SEQ ID NO: 102 - DNA, 10781 bp, Homo sapiens
gataggtgggggttgagaaatggctgggcagggcagcaaagcaactgccaaggactgggcaaaaggcaatagaatgcaattgaagcaggacgaatgcagatgaggaaactgagaatcacagagggttttggtgctcaacgagggtcacataaccaccccccacctcaggaaaacagtcccccacaaagaatggcagcccctccaagtgtccacgcttcctcaaggtcaagaactgggagactgaggtggttctcactgacaccctccaccttaagagcacattggaaacgggatgcactgagtacatctgcatgggctccatcatgcatccttctcagcatgcaaggaggcctgaagacgtccgcacaaaaggacagctcttccctctcgccaaagagtttattgatcaatactattcatcaattaaaagatttggctccaaagcccacatggaaaggctggaagaggtgaacaaagagatcgacaccactagcacttaccagctcaaggacacagagctcatctatggggccaagcacgcctggcggaatgcctcgcgctgtgtgggcaggatccagtggtccaagctgcaggtattcgatgcccgtgactgcaccacggcccacgggatgttcaactacatctgtaaccatgtcaagtatgccaccaacaaagggaacctcaggtctgccatcaccatattcccccagaggacagacggcaagcacgacttccgagtctggaactcccagctcatccgctacgctggctacaagcagcctgacggctccaccctgggggacccagccaatgtgcagttcacagagatatgcatacagcagggctggaaaccgcctagaggccgcttcgatgtcctgccgctcctgcttcaggccaacggcaatgaccctgagctcttccagattcctccagagctggtgttggaagttcccatcaggcaccccaagtttgagtggttcaaggacctggggctgaagtggtacggcctccccgccgtgtccaacatgctcctagagattggcggcctggagttcagcgcctgtcccttcagtggctggtacatgggcacagagattggtgtccgcgactactgtgacaactcccgctacaatatcctggaggaagtggccaagaagatgaacttagacatgaggaagacgtcctccctgtggaaggaccaggcgctggtggagatcaatatcgcggttctctatagcttccagagtgacaaagtgaccattgttgaccatcactccgccaccgagtccttcattaagcacatggagaatgagtaccgctgccgggggggctgccctgccgactgggtgtggatcgtgccccccatgtccggaagcatcacccctgtgttccaccaggagatgctcaactaccggctcaccccctccttcgaataccagcctgatccctggaacacgcatgtctggaaaggcaccaacgggacccccacaaagcggcgagccattggcttcaagaagctagcagaagctgtcaagttctcggccaagctgatggggcaggctatggccaagagggtgaaagcgaccatcctctatgccacagagacaggcaaatcgcaagcttatgccaagaccttgtgtgagatcttcaaacacgcctttgatgccaaggtgatgtccatggaagaatatgacattgtgcacctggaacatgaaactctggtccttgtggtcaccagcacctttggcaatggagatccccctgagaatggggagaaattcggctgtgctttgatggaaatgaggcaccccaactctgtgcaggaagaaaggaagagctacaaggtccgattcaacagcgtctcctcctactctgactcccaaaaatcatcaggcgatgggcccgacctcagagacaactttgagagtgctggacccctggccaatgtgaggttctcagtttttggcctcggctcacgagcataccctcacttttgcgccttcggacacgctgtggacaccctcctggaagaactgggaggggagaggatcctgaagatgagggaaggggatgagctctgtgggcaggaagaggctttcaggacctgggccaagaaggtcttcaaggcagcctgtgatgtcttctgtgtgggagatgatgtcaacattgaaaaggccaacaattccctcatcagcaatgatcgcagctggaagagaaacaagttccgcctcacctttgtggccgaagctccagaactcacacaaggtctatccaatgtccacaaaaagcgagtctcagctgcccggctccttagccgtcaaaacctccagagccctaaatccagtcggtcaactatcttcgtgcgtctccacaccaacgggagccaggagctgcagtaccagcctggggaccacctgggtgtcttccctggcaaccacgaggacctcgtgaatgccctgatcgagcggctggaggacgcgccgcctgtcaaccagatggtgaaagtggaactgctggaggagcggaacacggctttaggtgtcatcagtaactggacagacgagctccgcctcccgccctgcaccatcttccaggccttcaagtactacctggacatcaccacgccaccaacgcctctgcagctgcagcagtttgcctccctagctaccagcgagaaggagaagcagcgtctgctggtcctcagcaagggtttgcaggagtacgaggaatggaaatggggcaagaaccccaccatcgtggaggtgctggaggagttcccatctatccagatgccggccaccctgctcctgacccagctgtccctgctgcagccccgctactattccatcagctcctccccagacatgtaccctgatgaagtgcacctcactgtggccatcgtttcctaccgcactcgagatggagaaggaccaattcaccacggcgtatgctcctcctggctcaaccggatacaggctgacgaactggtcccctgtttcgtgagaggagcacccagcttccacctgccccggaacccccaagtcccctgcatcctcgttggaccaggcaccggcattgcccctttccgaagcttctggcaacagcggcaatttgatatccaacacaaaggaatgaacccctgccccatggtcctggtcttcgggtgccggcaatccaagatagatcatatctacagggaagagaccctgcaggccaagaacaagggggtcttcagagagctgtacacggcttactcccgggagccagacaaaccaaagaagtacgtgcaggacatcctgcaggagcagctggcggagtctgtgtaccgagccctgaaggagcaagggggccacatatacgtctgtggggacgtcaccatggctgctgatgtcctcaaagccatccagcgcatcatgacccagcaggggaagctctcggcagaggacgccggcgtattcatcagccggatgagggatgacaaccgataccatgaggatatttttggagtcaccctgcgaacgtacgaagtgaccaaccgccttagatctgagtccattgccttcattgaagagagcaaaaaagacaccgatgaggttttcagctcctaactggaccctcttgcccagccggctgcaagttttgtaagcgcggacagacactgctgaacctttcctctgggaccccctgtggccctcgctctgcctcctgtccttgtcgctgtgccctggtttccctcctcgggcttctcgcccctcagtggtttcctcggccctcctgggtttactccttgagttttcctgctgcgatgcaatgcttttctaatctgcagtggctcttacaaaactctgttcccactccctctcttgccgacaagggcaactcacgggtgcatgaaaccactggaacatggccgtcgctgtgggggtttttttctctggggttcccctggaaaggctgcaggaactaggcacaagctctctgagccagtccctcagccactgaagtccccctttctccttttttatgatgacattttggttgtgcgtgcctgtgtgtgtgtgtgtgtgtgtgtgtgtgtgtgtgatgggccaggtctctgtccgtcctcttccctgcacaagtgtgtcgatcttagattgccactgctttcattgaagaccctcaatgccaagaaacgtgtccctggcccatattaatccctcgtgtgtccataattagggtccacgcccatgtacctgaaacatttggaagccccataattgttctagttagaaagggttcagggcatggggagaggagtgggaaattgattaaaggggctgtctcccaatgaaagaggcattcccagaatttgctgcatttagattttgataccagtgagcagagccctcatgtgacatgaacccatccaatggattgtgcaaatcccctccccaaacccacccataccagctagaatcacttgactttgccacatccattgactgaccccctcctccagcaatagcatccaaggggcctggaagttatgttgttcaaagaagcctggtggcaataaggatcttcccactttgccactggatgactttggatgggtcacttgtcctcagtttttcctagtcataatgtcatacgaacctaaagaatatgaatggattaaatgttaaagctttggtgcctggaaacaatatcaagtaacaatatgattattatttttttattcccccaaagcgggcttgctgcttcacccttggggatgaaataatggaagctggttaaagtggatgaggttggaaagagttgccataatgaggtcccacgtggcttcttcgataggagccacaacttggggtgggaagaacttgtccctcaggcttgttgccctctgcagttgatctccaaagttttaaacctgttaaattaattttgacaaataagttaccctcaactcagatcaaaaatgggcagccaagtcttcggtaggaattggagccggtgtaattcctccctaagaggcaacctgttgaatttactctctcagagtaaatggtgggaagggatccctttgtatacttttttaaatactacaaattagtgtcaggcagttcccagaaagagacaagaaatcctagtggcctcccagactgcagggtccccaaggatggaaagggaatgttctgctggttctaccctgtttgttgtgtcttgctatacagaaaaaccacatttcttttatatactgtacgtgggcatatcttgttgttcagtttgggtgtctgctaaagaggaagtgcactggccctctttgaaagggctttacagtgggggcaccaagaccccaaagggcccaggccaggagactgttaaagtgaaaaggcaatctatgactcaccttgctctgccatccctggcagcccccaccggtgtcctgttcctgccacatggagcttgacttcatgccagctataatctcccctgccttcctttaatcccaatttcccctgctcactcttccacagatataaagaacaaacacttagcatcccacactcaccccttctaatcctgaagggaagcccattctaaactcctttcctgcaaacccatttccagctcctagtagctttcctcccaaaggctttctttccaatcctttatagctttggagacgcctccccaattccccagggaaggaaactgttgtgtccaatccccattaaagacaaattgatcagtgcttcccactccaagtcaagctttatgcaggaatgcttttccatcagggaataaatacttagaagcgcttacaaggtgccaggcacctcctttctgcatgtgcctgcctttctagtagcagacagatggaaacattgtctcattttgtcaaggagtccaaagaaatgattataaaaccaggattcatccttcttctccagaaagatttttttttaagtaaacacctttcaatccccaacacaagctgcttcacaactccaggctagaaggcaggagagcgatctgatgtgtttctttcatttgccagaattcctgataccaaaagcctctctctctgttgagtaacctctcaaggaccagagtggagtccagattgttaggctcagatcaagggtggggaaatactgccctctcgtggtggcttttcatccaggcctcgtagccaaccgtttaagtgcaaaatagaattaagcaatgggtaagcaaaatagggttgacaagatatttgggggttattcgggttatggcccatttatttccctcttccccctgaattgaccagtagcagctccagccccatttcacaaaagtgagtttggccaggaggaatgagacgtctcctgaaataggaacaccggaacatcatgctcacctgccatcactatgcatccagttcccacagcttgtgtcgtgaaagagcagagagatgatgttaaactccttgggaggagagagggcttcttttggtttccctggagtgagacagccaggtgtctttcttttgcggggggacacttcagacccatcaatatggaattttgggagccgacctgagtgcaaatcctaattctgcccctgttggtgcagatggctgtgggcggctcacttgaccttttagagtctgcatacccacctgtataacaaggtggattgaatgagacaatgcccacgaaatgcccagttacagtacctggttcaaaacttactgcattttaatttttcacttaacttataacatgtcttgcttctccagtgtgtggaaggcaccgggcagtttgcagagataagcaaaacacagttcctctcgtgcagaaggttagaatctatttttttttttgacagagtcttgctctgtcacccaggctggcgtacagtggtacgatctcagctcactgcatcctctgcctcccccagttcaagtgattcttctgcctcggcctcctgagtaactgggactacaggcgcctaccaccacgcccagctaagttttgtatttttagtagagtcagggtttcaccatgttggccaggctggtcttgaattcctgacctcaaatgatccacgcacctcagcctcccaaagtgctggattacaggcatgagccaccacgcccagccaaaggttataatctgatggagagagacacccgtcttggaactgacataaatttctggggtttgagaaatgggcgggatttcactggtagcttctggaaggtaagagttgtccaggaattgggaagagtgagaggaaaggcacggacagggagcatgtaagataaattgaggctggctttggaaggctgaggagggtgagaaaaggtgggctgggaccagaccgtggggagaggtgagtggcattacaagaaatttaggctttattcagaaggcaacagggagtccctaagaatgtttttcaaaaagggacattaaggcgattggagttatacttggaaaagaaagttctggccacagtacagagcatggcccgttgagctgttgggggggttattgctgcaaccaaggcttgagtgagggaagaggcggatgtagtgataaagagactccaggaactgaatcagcgtacctggcaccccatccattgtagagggtgagaataaaggagaaattaaagcatcttgcaggctgggcgcggtagctcatgtctgtaatcccagcactttgggaggccgaggtgggtgtatcagttgaggtcaggagttggagaccagtcagccagttagtagaaaccctgactctactaagaaaatacaaaaattagctgggcatggtggcatgcgcctgtagtctcagctacctgggaggctgaggaaggaggatcgcttgagcccaggaggtggaggctgcagtgagccaagattgtaccactgcactccagcctgggtgacagagcaagactcttatctcaaaaaaaataaaataaaataaaataaaataaaacatcttgcccctagctgagagagaggtctctgaagagcaggctcagggaaaagatgagttttcagagctgatgtgatagtcagcttctctggagtcaacagggtgaatccttcccaagtccagccatgcccagatgcccggagggaaaactgacccccagccagtagacattggctaagaacacagaatcttctgaccaaacacgctttcagcagctgcctgctctggactttgaaagaggtcaggtcttgccctaagctcaaaacaagtgagaggtgtcctgacctagctcatagggcaaatggtcctaataggatgggcaatccagatgcctgagccccttcactccgacagcaccagcgcctaatgcagccttttcattcttgccattaggaaatctgtggacttctagcctgtgttttaaaccagccatgtttccttgtatatttccctacccgctgccccacatacccagcatgccgctgtggccaccatgtcctcaaagccttctgtctgtatcaggaatgtagtctgagactgccaggaagcaacaaggagagagaaacactaactagtcttcctttataacccattcatactctctggctgtccccaaccttcatagtctcctgcatccaaatgtcctctttggctcaaaaagtaggccaggcatggtggttcatgcctgtaatagcactttgggagactgaggtgggaggatcacttggggccaggagtttgagaccagcttgggcaacacagcgcaatctcgtctctactaaaaaaaaaaaaaaaaaaaaattagctgggcatgatggcatgctcctgtggtcccagctacttgggaggctgaggcaggaggatcacttggtcccaggagtttgaggcgacagtgagctaggatcgcaccactgcactccagcctgagtgacagagcaagaccctgtctctaaaaaaaattaaaatgaaagaccaggtgctgggattaaggaaacacaggtctgagggtctgagggaaggggcctgcctcccagggagtcaacatagatgttccccatgaacagggatttgactttggaggccaacctggcctggcctctgccctttatctcacactccctatccttggcccactgccagtccctgccttgtggcaaaggggccccaaaagaaaagctgcccttccccaaatgtaaggacccaggtacactttcacccgtggaaagcagtgtctgtcgagagtctgtttcctattaatacttatcaaagccatgtgcgagggaggtggtcagctgtcaatatgccttagtatgtttatatgagtttgttttgttctaaaatacccaaacagttctggtcaagcggggctatgcccgtctggcccaaaacacagtccgttattaacgagatggccctggcaggcgggaacaaatctgcctccatgcactgcttcctgtagtcttttagaaagtaactccaggacatcgaagtgcccagatttgactcctaagttctaggagactgtagcgcagggtctgtcaaccttagcactattggcatttggggctgggtaattctttcttgtgggggccgtcttgggtactgtaggaagctgagcagcattcctggcctccatccacaagatacctgtagcagtgtcctgccaacggtaacaatcaagtatgtcatcagacattgcccaatgtccccagggggcaacacccctctcttggacttcagggtcaagagaatctctgctggctaccccaggacttctcattatagatttcctggagcacgcagcagaaactttgcctagcccagtggttgtttccattatctgctgccaaagtgggatttgagggtgtccgggggagggggcatggggagggcagtatgctttcaaaaacccctcccaggccaggcgtggtggctcatgcctgtaatcacaggactttgggaggccgaggctggcagatcacttgaggctgggagttagagaccaacctggctaacatggcaaaacctcgtctctactaaaaatacaaaaatcagcccggcgtggtggcgggcatctgtaatcccatctactcgggaggctgaggcaggagaattacttgaacccaggaggcagaggctgcagtgagccgagatggcaccactgcactccagcttgttgacagaatgagaccctgtggaaaaaaaaaaaaaagccctcccatgccagaacagaggatggcagtctgtttcaataagacactgtgtccttggtgttggttctgattaagactcactgagatccagtgctcttgagctgggtctcagtcccctcccatgtcctgtgctctgccgccactgttttcattgttgtgttctcgttgtgattgttaagactcacactcctggctcagcagtggttttccagaaggcccaaagagcggtgccgggcaccccacgtcgcagtgtccgttccgggcttgggaagctggggaggtgggcagacctggtcgcatctcaccacacacacacacacacacacacacacacacgctgtcagaaactcggccgtcccccctacctctgagctctcaatgctgctaatctctgccaagtgtccctgtgctccagcaccttccttgaaggactgacgcccaccccacgctctttgcgaggttgtccaggctgtgtttgtcgcatgctcttcttctgtatagttctcatcttccaattttatgggattcaacaaaagcctattatgcttgtttgcattatggttacaatattaaaaagtggattcaaaaaaaa

SEQ ID NO: 103 - DNA, 4206 bp, Homo sapiens
ataactttgtagcgagtcgaaaactgaggctccggccgcagagaactcagcctcattcctgctttaaaatctctcggccacctttgatgaggggactgggcagttctagacagtcccgaagttctcaaggcacaggtctcttcctggtttgactgtccttaccccggggaggcagtgcagccagctgcaagccccacagtgaagaacatctgagctcaaatccagataagtgacataagtgacctgctttgtaaagccatagagatggcctgtccttggaaatttctgttcaagaccaaattccaccagtatgcaatgaatggggaaaaagacatcaacaacaatgtggagaaagccccctgtgccacctccagtccagtgacacaggatgaccttcagtatcacaacctcagcaagcagcagaatgagtccccgcagcccctcgtggagacgggaaagaagtctccagaatctctggtcaagctggatgcaaccccattgtcctccccacggcatgtgaggatcaaaaactggggcagcgggatgactttccaagacacacttcaccataaggccaaagggattttaacttgcaggtccaaatcttgcctggggtccattatgactcccaaaagtttgaccagaggacccagggacaagcctacccctccagatgagcttctacctcaagctatcgaatttgtcaaccaatattacggctccttcaaagaggcaaaaatagaggaacatctggccagggtggaagcggtaacaaaggagatagaaacaacaggaacctaccaactgacgggagatgagctcatcttcgccaccaagcaggcctggcgcaatgccccacgctgcattgggaggatccagtggtccaacctgcaggtcttcgatgcccgcagctgttccactgcccgggaaatgtttgaacacatctgcagacacgtgcgttactccaccaacaatggcaacatcaggtcggccatcaccgtgttcccccagcggagtgatggcaagcacgacttccgggtgtggaatgctcagctcatccgctatgctggctaccagatgccagatggcagcatcagaggggaccctgccaacgtggaattcactcagctgtgcatcgacctgggctggaagcccaagtacggccgcttcgatgtggtccccctggtcctgcaggccaatggccgtgaccctgagctcttcgaaatcccacctgaccttgtgcttgaggtggccatggaacatcccaaatacgagtggtttcgggaactggagctaaagtggtacgccctgcctgcagtggccaacatgctgcttgaggtgggcggcctggagttcccagggtgccccttcaatggctggtacatgggcacagagatcggagtccgggacttctgtgacgtccagcgctacaacatcctggaggaagtgggcaggagaatgggcctggaaacgcacaagctggcctcgctctggaaagaccaggctgtcgttgagatcaacattgctgtgctccatagtttccagaagcagaatgtgaccatcatggaccaccactcggctgcagaatccttcatgaagtacatgcagaatgaataccggtcccgtgggggctgcccggcagactggatttggctggtccctcccatgtctgggagcatcacccccgtgtttcaccaggagatgctgaactacgtcctgtcccctttctactactatcaggtagaggcctggaaaacccatgtctggcaggacgagaagcggagacccaagagaagagagattccattgaaagtcttggtcaaagctgtgctctttgcctgtatgctgatgcgcaagacaatggcgtcccgagtcagagtcaccatcctctttgcgacagagacaggaaaatcagaggcgctggcctgggacctgggggccttattcagctgtgccttcaaccccaaggttgtctgcatggataagtacaggctgagctgcctggaggaggaacggctgctgttggtggtgaccagtacgtttggcaatggagactgccctggcaatggagagaaactgaagaaatcgctcttcatgctgaaagagctcaacaacaaattcaggtacgctgtgtttggcctcggctccagcatgtaccctcggttctgcgcctttgctcatgacattgatcagaagctgtcccacctgggggcctctcagctcaccccgatgggagaaggggatgagctcagtgggcaggaggacgccttccgcagctgggccgtgcaaaccttcaaggcagcctgtgagacgtttgatgtccgaggcaaacagcacattcagatccccaagctctacacctccaatgtgacctgggacccgcaccactacaggctcgtgcaggactcacagcctttggacctcagcaaagccctcagcagcatgcatgccaagaacgtgttcaccatgaggctcaaatctcggcagaatctacaaagtccgacatccagccgtgccaccatcctggtggaactctcctgtgaggatggccaaggcctgaactacctgccgggggagcaccttggggtttgcccaggcaaccagccggccctggtccaaggtatcctggagcgagtggtggatggccccacaccccaccagacagtgcgcctggaggccctggatgagagtggcagctactgggtcagtgacaagaggctgcccccctgctcactcagccaggccctcacctacttcctggacatcaccacacccccaacccagctgctgctccaaaagctggcccaggtggccacagaagagcctgagagacagaggctggaggccctgtgccagccctcagagtacagcaagtggaagttcaccaacagccccacattcctggaggtgctagaggagttcccgtccctgcgggtgtctgctggcttcctgctttcccagctccccattctgaagcccaggttctactccatcagctcctcccgggatcacacgcccacagagatccacctgactgtggccgtggtcacctaccacacccgagatggccagggtcccctgcaccacggcgtctgcagcacatggctcaacagcctgaagccccaagacccagtgccctgctttgtgcggaatgccagcggcttccacctccccgaggatccctcccatccttgcatcctcatcgggcctggcacaggcatcgcgcccttccgcagtttctggcagcaacggctccatgactcccagcacaagggagtgcggggaggccgcatgaccttggtgtttgggtgccgccgcccagatgaggaccacatctaccaggaggagatgctggagatggcccagaagggggtgctgcatgcggtgcacacagcctattcccgcctgcctggcaagcccaaggtctatgttcaggacatcctgcggcagcagctggccagcgaggtgctccgtgtgctccacaaggagccaggccacctctatgtttgcggggatgtgcgcatggcccgggacgtggcccacaccctgaagcagctggtggctgccaagctgaaattgaatgaggagcaggtcgaggactatttctttcagctcaagagccagaagcgctatcacgaagatatctttggtgctgtatttccttacgaggcgaagaaggacagggtggcggtgcagcccagcagcctggagatgtcagcgctctgagggcctacaggaggggttaaagctgccggcacagaacttaaggatggagccagctctgcattatctgaggtcacagggcctggggagatggaggaaagtgatatcccccagcctcaagtcttatttcctcaacgttgctccccatcaagccctttacttgacctcctaacaagtagcaccctggattgatcggagcctcctctctcaaactggggcctccctggtcccttggagacaaaatcttaaatgccaggcctggcaagtgggtgaaagatggaacttgctgctgagtgcaccacttcaagtgaccaccaggaggtgctatcgcaccactgtgtatttaactgccttgtgtacagttatttatgcctctgtatttaaaaaactaacacccagtctgttccccatggccacttgggtcttccctgtatgattccttgatggagatatttacatgaattgcattttactttaatcaca

SEQ ID NO: 104 - DNA, 642 bp, Homo sapiens
tgcatcgttagcttctcctgataaactaattgcctcacattgtcactgcaaatcgacacctattaatgggtctcacctcccaactgcttccccctctgttcttcctgctagcatgtgccggcaactttgtccacggacacaagtgcgatatcaccttacaggagatcatcaaaactttgaacagcctcacagagcagaagactctgtgcaccgagttgaccgtaacagacatctttgctgcctccaagaacacaactgagaaggaaaccttctgcagggctgcgactgtgctccggcagttctacagccaccatgagaaggacactcgctgcctgggtgcgactgcacagcagttccacaggcacaagcagctgatccgattcctgaaacggctcgacaggaacctctggggcctggcgggcttgaattcctgtcctgtgaaggaagccaaccagagtacgttggaaaacttcttggaaaggctaaagacgatcatgagagagaaatattcaaagtgttcgagctgaatattttaatttatgagtttttgatagctttattttttaagtatttatatatttataactcatcataaaataaagtatatatagaatctaaaaaaaaaaaaaaaaaaaaaaaaaa

SEQ ID NO: 105 - DNA, 594 bp, Homo sapiens
tgcatcgttagcttctcctgataaactaattgcctcacattgtcactgcaaatcgacacctattaatgggtctcacctcccaactgcttccccctctgttcttcctgctagcatgtgccggcaactttgtccacggacacaagtgcgatatcaccttacaggagatcatcaaaactttgaacagcctcacagagcagaagaacacaactgagaaggaaaccttctgcagggctgcgactgtgctccggcagttctacagccaccatgagaaggacactcgctgcctgggtgcgactgcacagcagttccacaggcacaagcagctgatccgattcctgaaacggctcgacaggaacctctggggcctggcgggcttgaattcctgtcctgtgaaggaagccaaccagagtacgttggaaaacttcttggaaaggctaaagacgatcatgagagagaaatattcaaagtgttcgagctgaatattttaatttatgagtttttgatagctttattttttaagtatttatatatttataactcatcataaaataaagtatatatagaatctaaaaaaaaaaaaaaaaaaaaaaaaaa

SEQ ID NO: 106 - DNA, 1629 bp, Homo sapiens
acacatcaggggcttgctcttgcaaaaccaaaccacaagacagacttgcaaaagaaggcatgcacagctcagcactgctctgttgcctggtcctcctgactggggtgagggccagcccaggccagggcacccagtctgagaacagctgcacccacttcccaggcaacctgcctaacatgcttcgagatctccgagatgccttcagcagagtgaagactttctttcaaatgaaggatcagctggacaacttgttgttaaaggagtccttgctggaggactttaagggttacctgggttgccaagccttgtctgagatgatccagttttacctggaggaggtgatgccccaagctgagaaccaagacccagacatcaaggcgcatgtgaactccctgggggagaacctgaagaccctcaggctgaggctacggcgctgtcatcgatttcttccctgtgaaaacaagagcaaggccgtggagcaggtgaagaatgcctttaataagctccaagagaaaggcatctacaaagccatgagtgagtttgacatcttcatcaactacatagaagcctacatgacaatgaagatacgaaactgagacatcagggtggcgactctatagactctaggacataaattagaggtctccaaaatcggatctggggctctgggatagctgacccagccccttgagaaaccttattgtacctctcttatagaatatttattacctctgatacctcaacccccatttctatttatttactgagcttctctgtgaacgatttagaaagaagcccaatattataatttttttcaatatttattattttcacctgtttttaagctgtttccatagggtgacacactatggtatttgagtgttttaagataaattataagttacataagggaggaaaaaaaatgttctttggggagccaacagaagcttccattccaagcctgaccacgctttctagctgttgagctgttttccctgacctccctctaatttatcttgtctctgggcttggggcttcctaactgctacaaatactcttaggaagagaaaccagggagcccctttgatgattaattcaccttccagtgtctcggagggattcccctaacctcattccccaaccacttcattcttgaaagctgtggccagcttgttatttataacaacctaaatttggttctaggccgggcgcggtggctcacgcctgtaatcccagcactttgggaggctgaggcgggtggatcacttgaggtcaggagttcctaaccagcctggtcaacatggtgaaaccccgtctctactaaaaatacaaaaattagccgggcatggtggcgcgcacctgtaatcccagctacttgggaggctgaggcaagagaattgcttgaacccaggagatggaagttgcagtgagctgatatcatgcccctgtactccagcctgggtgacagagcaagactctgtctcaaaaaataaaaataaaaataaatttggttctaatagaactcagttttaactagaatttattcaattcctctgggaatgttacattgtttgtctgtcttcatagcagattttaattttgaataaataaatgtatcttattcacatc

SEQ ID NO: 107 - DNA, 2217 bp, Homo sapiens
ccccgccgccgccgcccttcgcgccctgggccatctccctcccacctccctccgcggagcagccagacagcgagggccccggccgggggcaggggggacgccccgtccggggcacccccccggctctgagccgcccgcggggccggcctcggcccggagcggaggaaggagtcgccgaggagcagcctgaggccccagagtctgagacgagccgccgccgcccccgccactgcggggaggagggggaggaggagcgggaggagggacgagctggtcgggagaagaggaaaaaaacttttgagacttttccgttgccgctgggagccggaggcgcggggacctcttggcgcgacgctgccccgcgaggaggcaggacttggggaccccagaccgcctccctttgccgccggggacgcttgctccctccctgccccctacacggcgtccctcaggcgcccccattccggaccagccctcgggagtcgccgacccggcctcccgcaaagacttttccccagacctcgggcgcaccccctgcacgccgccttcatccccggcctgtctcctgagcccccgcgcatcctagaccctttctcctccaggagacggatctctctccgacctgccacagatcccctattcaagaccacccaccttctggtaccagatcgcgcccatctaggttatttccgtgggatactgagacacccccggtccaagcctcccctccaccactgcgcccttctccctgaggacctcagctttccctcgaggccctcctaccttttgccgggagacccccagcccctgcaggggcggggcctccccaccacaccagccctgttcgcgctctcggcagtgccggggggcgccgcctcccccatgccgccctccgggctgcggctgctgccgctgctgctaccgctgctgtggctactggtgctgacgcctggccggccggccgcgggactatccacctgcaagactatcgacatggagctggtgaagcggaagcgcatcgaggccatccgcggccagatcctgtccaagctgcggctcgccagccccccgagccagggggaggtgccgcccggcccgctgcccgaggccgtgctcgccctgtacaacagcacccgcgaccgggtggccggggagagtgcagaaccggagcccgagcctgaggccgactactacgccaaggaggtcacccgcgtgctaatggtggaaacccacaacgaaatctatgacaagttcaagcagagtacacacagcatatatatgttcttcaacacatcagagctccgagaagcggtacctgaacccgtgttgctctcccgggcagagctgcgtctgctgaggctcaagttaaaagtggagcagcacgtggagctgtaccagaaatacagcaacaattcctggcgatacctcagcaaccggctgctggcacccagcgactcgccagagtggttatcttttgatgtcaccggagttgtgcggcagtggttgagccgtggaggggaaattgagggctttcgccttagcgcccactgctcctgtgacagcagggataacacactgcaagtggacatcaacgggttcactaccggccgccgaggtgacctggccaccattcatggcatgaaccggcctttcctgcttctcatggccaccccgctggagagggcccagcatctgcaaagctcccggcaccgccgagccctggacaccaactattgcttcagctccacggagaagaactgctgcgtgcggcagctgtacattgacttccgcaaggacctcggctggaagtggatccacgagcccaagggctaccatgccaacttctgcctcgggccctgcccctacatttggagcctggacacgcagtacagcaaggtcctggccctgtacaaccagcataacccgggcgcctcggcggcgccgtgctgcgtgccgcaggcgctggagccgctgcccatcgtgtactacgtgggccgcaagcccaaggtggagcagctgtccaacatgatcgtgcgctcctgcaagtgcagctgaggtcccgccccgccccgccccgccccggcaggcccggccccaccccgccccgcccccgctgccttgcccatgggggctgtatttaaggacacccgtgccccaagcccacctggggccccattaaagatggagagaggactgcggaaaaaaaaaaaaaaaaaa

SEQ ID NO: 108 - DNA, 1606 bp, Homo sapiens
aaatgtgaccggccgcggctccggcagtcaacgcctgcctcctctcgagcgtcctcagcgcagccgccgcccgcggagccagcacgaacgagcccagcaccggccggatggagcgtccgcaacccgacagcatgccccaggatttgtcagaggccctgaaggaggccaccaaggaggtgcacacccaggcagagaatgctgagttcatgaggaactttcagaagggccaggtgacccgagacggcttcaagctggtgatggcctccctgtaccacatctatgtggccctggaggaggagattgagcgcaacaaggagagcccagtcttcgcccctgtctacttcccagaagagctgcaccgcaaggctgccctggagcaggacctggccttctggtacgggccccgctggcaggaggtcatcccctacacaccagccatgcagcgctatgtgaagcggctccacgaggtggggcgcacagagcccgagctgctggtggcccacgcctacacccgctacctgggtgacctgtctgggggccaggtgctcaaaaagattgcccagaaagccctggacctgcccagctctggcgagggcctggccttcttcaccttccccaacattgccagtgccaccaagttcaagcagctctaccgctcccgcatgaactccctggagatgactcccgcagtcaggcagagggtgatagaagaggccaagactgcgttcctgctcaacatccagctctttgaggagttgcaggagctgctgacccatgacaccaaggaccagagcccctcacgggcaccagggcttcgccagcgggccagcaacaaagtgcaagattctgcccccgtggagactcccagagggaagcccccactcaacacccgctcccaggctccgcttctccgatgggtccttacactcagctttctggtggcgacagttgctgtagggctttatgccatgtgaatgcaggcatgctggctcccagggccatgaactttgtccggtggaaggccttctttctagagagggaattctcttggctggcttccttaccgtgggcactgaaggctttcagggcctccagccctctcactgtgtccctctctctggaaaggaggaaggagcctatggcatcttccccaacgaaaagcacatccaggcaatggcctaaacttcagagggggcgaagggatcagccctgcccttcagcatcctcagttcctgcagcagagcctggaagacaccctaatgtggcagctgtctcaaacctccaaaagccctgagtttcaagtatccttgttgacacggccatgaccactttccccgtgggccatggcaatttttacacaaacctgaaaagatgttgtgtcttgtgtttttgtcttatttttgttggagccactctgttcctggctcagcctcaaatgcagtatttttgttgtgttctgttgtttttatagcagggttggggtggtttttgagccatgcgtgggtggggagggaggtgtttaacggcactgtggccttggtctaacttttgtgtgaaataataaacaacattgtctgatagtagcttgaaaaaaaaaaaaaaaaaa

SEQ ID NO: 109 - DNA, 1587 bp, Homo sapiens
cgcggccgcctgtctgcacagacagcaccatgtcgctcatggtcgtcagcatggcgtgtgttgggttcttcttgctgcagggggcctggccacatgagggagtccacagaaaaccttccctcctggcccacccaggtcgcctggtgaaatcagaagagacagtcatcctgcaatgttggtcagatgtcaggtttgagcacttccttctgcacagagaagggaagtttaaggacactttgcacctcattggagagcaccatgatggggtctccaaagccaacttctccatcggtcccatgatgcaagaccttgcagggacctacagatgctacggttctgttactcactccccctatcagttgtcagctcccagtgaccctctggacatcgtcatcacaggtctatatgagaaaccttctctctcagcccagccgggccccacggttctggcaggagagagcgtgaccttgtcctgcagctcccggagctcctatgacatgtaccatctatccagggagggggaggcccatgaatgtaggttctctgcagggcccaaggtcaacggaacattccaggccgactttcctctgggccctgccacccacggaggaacctacagatgcttcggctctttccgtgactctccatacgagtggtcaaactcgagtgacccactgcttgtttctgtcacaggaaacccttcaaatagttggccttcacccactgaaccaagctctaaaaccggtaacccccgacacctgcacattctgattgggacctcagtggtcatcatcctcttcatcctcctcttctttctccttcatcgctggtgctccaacaaaaaaaatgctgcggtaatggaccaagagtctgcagggaacagaacagcgaatagcgaggactctgatgaacaagaccctcaggaggtgacatacacacagttgaatcactgcgttttcacacagagaaaaatcactcgcccttctcagaggcccaagacacccccaacagatatcatcgtgtacacggaacttccaaatgctgagtccagatccaaagttgtctcctgcccatgagcaccacagtcaggccttgagggcgtcttctagggagacaacagccctgtctcaaaaccgggttgccagctcccatgtaccagcagctggaatctgaaggcatgagtctgcatcttagggcatcgctcttcctcacaccacaaatctgaatgtgcctctcacttgcttacaaatgtctaaggtccccactgcctgctggagaaaaaacacactcctttgcttagcccacagttctccatttcacttgacccctgcccacctctccaacctaactggcttacttcctagtctacttgaggctgcaatcacactgaggaactcacaattccaaacatacaagaggctccctcttaacgcagcacttagacacgtgttgttccaccttccctcatgctgttccacctcccctcagactagctttcagtcttctgtcagcagtaaaacttatatattttttaaaataacttcaatgtagttttccatccttcaaataaacatgtctgcccccatg

SEQ ID NO: 110 - DNA, 1559 bp, Homo sapiens
tgtctgcacagacagcaccatgtcgctcatggtcgtcagcatggcgtgtgttgggttcttcttgctgcagggggcctggccacatgagggagtccacagaaaaccttccctcctggcccacccaggtcccctggtgaaatcagaagagacagtcatcctgcaatgttggtcagatgtcaggtttgagcacttccttctgcacagagaggggaagtataaggacactttgcacctcattggagagcaccatgatggggtctccaaggccaacttctccatcggtcccatgatgcaagaccttgcagggacctacagatgctacggttctgttactcactccccctatcagttgtcagctcccagtgaccctctggacatcgtcatcacaggtctatatgagaaaccttctctctcagcccagccgggccccacggttttggcaggagagagcgtgaccttgtcctgcagctcccggagctcctatgacatgtaccatctatccagggagggggaggcccatgaacgtaggttctctgcagggcccaaggtcaacggaacattccaggccgactttcctctgggccctgccacccacggaggaacctacagatgcttcggctctttccgtgactctccctatgagtggtcaaactcgagtgacccactgcttgtttctgtcacaggaaacccttcaaatagttggccttcacccactgaaccaagctccaaaaccggtaaccccagacacctgcatgttctgattgggacctcagtggtcaaaatccctttcaccatcctcctcttctttctccttcatcgctggtgctccaacaaaaaaaatgctgctgtaatggaccaagagcctgcagggaacagaacagtgaacagcgaggattctgatgaacaagaccatcaggaggtgtcatacgcataattggatcactgtgttttcacacagagaaaaatcactcgcccttctgagaggcccaagacacccccaacagataccagcatgtacatagaacttccaaatgctgagcccagatccaaagttgtcttctgtccacgagcaccacagtcaggccttgaggggatcttctagggagacaacagccctgtctcaaaaccgggttgccagctcccatgtaccagcagctggaatctgaaggcatcagtcttcatcttagggcatcgctcttcctcacaccacgaatctgaacatgcctctctcttgcttacaaatgtctaaggtccccactgcctgctggagagaaaacacactcctttgcttagcccacaattctccatttcacttgacccctgcccacctctccaacctaactggcttacttcctagtctacctgaggctgcaatcacactgaggaactcacaattccaaacatacaagaggctgcctcttaacacagcacttagacacgtgctgttccacctcccttcagactatctttcagccttctgccagcagtaaaacttataaattttttaaataatttcaatgtagttttcccgccttcaaataaacatgtctgccctcatg

SEQ ID NO: 111 - DNA, 1596 bp, Homo sapiens
agctggggcgcggccgcctgtctgcacagacagcaccatgtcgctcatggtcgtcagcatggtgtgtgttgggttcttcttgctgcagggggcctggccacatgagggagtccacagaaaaccttccctcctggcccacccaggtcccctggtgaaatcagaagagacagtcatcctgcaatgttggtcagatgtcaggtttcagcacttccttctgcacagagaagggaagtttaaggacactttgcacctcattggagagcaccatgatggggtctccaaggccaacttctccatcggtcccatgatgcaagaccttgcagggacctacagatgctacggttctgttactcactccccctatcagttgtcagctcccagtgaccctctggacatcgtcatcacaggtctatatgagaaaccttctctctcagcccagccgggccccacggttctggcaggagagagcgtgaccttgtcctgcagctcccggagctcctatgacatgtaccatctatccagggagggggaggcccatgaacgtaggttctctgcagggcccaaggtcaacggaacattccaggccgactttcctctgggccctgccacccacggaggaacctacagatgcttcggctctttccgtgactctccatacgagtggtcaaactcgagtgacccactgcttgtttctgtcacaggaaacccttcaaatagttggccttcacccactgaaccaagctccgaaaccggtaaccccagacacctgcatgttctgattgggacctcagtggtcatcatcctcttcatcctcctcctcttctttctccttcatcgctggtgctgcaacaaaaaaaatgctgttgtaatggaccaagagcctgcagggaacagaacagtgaacagggaggactctgatgaacaagaccctcaggaggtgacatatgcacagttgaatcactgcgttttcacacagagaaaaatcactcgcccttctcagaggcccaagacacccccaacagatatcatcgtgtacacggaacttccaaatgctgagccctgatccaaagttgtctcctgcccatgagcaccacagtcaggccttgaggggatcttctagggagacaacagccctgtctcaaaactgggttgccagctccaatgtaccagcagctggaatctgaaggcgtgagtctgcatcttagggcatcgctcttcctcacaccacaaatctgaacgtgcctctcccttgcttacaaatgtctaaggtccccactgcctgctggagagaaaacacactcctttgcttagcccacaattctccatttcacttgacccctgcccacctctccaacctaactggcttacttcctagtctacttgaggctgcaatcacactgaggaactcacaattccaaacatacaagaggctccctcttaacacggcacttagacacgtgctgttccaccttccctcatgctgttccacctcccctcagactagctttcagccttctgtcagcagtaaaacttatatattttttaaaataatttcaatgtagttttccctccttcaaataaacatgtctgccctca

SEQ ID NO: 112 - DNA, 1602 bp, Homo sapiens
aggggtgcggccgcctgtctgcaccggcagcaccatgtcgctcatggtcatcagcatggcgtgtgttgcgttcttcttgctgcagggggcctggccacatgagggattccgcagaaaaccttccctcctggcccacccaggtcccctggtgaaatcagaagagacagtcatcctgcaatgttggtcagatgtcatgtttgagcacttccttctgcacagagaggggacgtttaaccacactttgcgcctcattggagagcacattgatggggtctccaagggcaacttctccatcggtcgcatgacacaagacctggcagggacctacagatgctacggttctgttactcactccccctatcagttgtcagcgcccagtgaccctctggacatcgtgatcacaggtctatatgagaaaccttctctctcagcccagccgggccccacggttctggcaggagagagcgtgaccttgtcctgcagctcccggagctcctatgacatgtaccatctatccagggaaggggaggcccatgaacgtaggctccctgcagggcccaaggtcaacagaacattccaggccgactttcctctggaccctgccacccacggagggacctacagatgcttcggctctttccgtgactctccatacgagtggtcaaagtcaagtgacccactgcttgtttctgtcacaggaaactcttcaaatagttggccttcacccactgaaccaagctccgaaaccggtaaccccagacacctacacgttctgattgggacctcagtggtcaaactccctttcaccatcctcctcttctttctccttcatcgctggtgctccaacaaaaaaaatgcatctgtaatggaccaagggcctgcggggaacagaacagtgaacagggaggattctgatgaacaggaccatcaggaggtgtcatacgcataattggatcactgtgttttcacacagagaaaaatcactcccccttctcagaggcccaagacacccccaacagataccagcatgtacatagaacttccaaatgctgagtccagatccaaagctgtcttctgtccacgagcaccacagtcaggccttgaggggatcttctagggagacaacagccctgtctcaaaaccgggttgccagctcccatgtaccagcagctggaatctgaaggcatcagtcttcatcttaggggatcgctcttcctcaaaccacgaatctgaacatgcctctctcttgcttacaaatgtctaaggtccccactgcctgctggagagaaaacacactcctttgcttagcccacaattctccatttcacttgacccctgcccacctctccaacctaactggcttacttcctagtctacttgaggctgcaatcacactgaggaactcacaattccaaacatacaagaggctccctcttaacacagcacttagacacgtgctgttccaccttctctcatgcagttccacctcccctcagactatctttcagccttctgtcagcagtaaaacttataaattgtttttagtaatttcaatgtagttttccctccttcaaataaacatgtctgccctcatggtttcga

SEQ ID NO: 113 - DNA, 1505 bp, Homo sapiens
tcgagccgagtcactgcgtcctggcagcagaagctgcaccatgtccatgtcacccacggtcatcatcctggcatgtcttgggttcttcttggaccagagtgtgtgggcacacgtgggtggtcaggacaagcccttctgctctgcctggcccagcgctgtggtgcctcaaggaggacacgtgactcttcggtgtcactatcgtcgtgggtttaacatcttcacgctgtacaagaaagatggggtccctgtccctgagctctacaacagaatattctggaacagtttcctcattagccctgtgaccccagcacacgcagggacctacagatgtcgaggttttcacccgcactcccccactgagtggtcggcacccagcaaccccctggtgatcatggtcacaggtctatatgagaaaccttcgcttacagcccggccgggccccacggttcgcgcaggagagaacgtgaccttgtcctgcagctcccagagctcctttgacatctaccatctatccagggagggggaagcccatgaacttaggctccctgcagtgcccagcatcaatggaacattccaggccgacttccctctgggtcctgccacccacggagagacctacagatgcttcggctctttccatggatctccctacgagtggtcagacccgagtgacccactgcctgtttctgtcacaggaaacccttctagtagttggccttcacccactgaaccaagcttcaaaactgatgctgctgtaatgaaccaagagcctgcgggacacagaacagtgaacagggaggactctgatgaacaagaccctcaggaggtgacatacgcacagttggatcactgcattttcacacagagaaaaatcactggcccttctcagaggagcaagagaccctcaacagataccagcgtgtgtatagaacttccaaatgctgagcccagagcgttgtctcctgcccatgagcaccacagtcaggccttgatgggatcttctagggagacaacagccctgtctcaaacccagcttgccagctctaatgtaccagcagctggaatctgaaggcgtgagtctccatcttagagcatcactcttcctcacaccacaaatctggtgcctgtctcttgcttaccaatgtctaaggtccccactgcctgctgcagagaaaacacactcctttgcttagcccacaattctctatttcacttgacccctgcccacctctccaacctaactggcttacttcctagtctacttgaggctgcaatcacactgaggaactcacaattccaaacatacaagaggctctctcttaacacggcacttagacacgtgctgttccaccttccctcgtgctgttccacctttcctcagactatttttcagccttctggcatcagcaaaccttataaaatttttttgatttcagtgtagttctctcctcttcaaataaacatgtctgccttcaaaaaaaaaaaaaaaaaaaaaaaaaaaaaaa

SEQ ID NO: 114 - DNA, 1885 bp, Homo sapiens
ggggcgcggcctcctgtctgcaccggcagcaccatgtcgctcacggtcgtcagcatggcgtgcgttgggttcttcttgctgcagggggcctggccactcatgggtggtcaggacaaacccttcctgtctgcccggcccagcactgtggtgcctcgaggaggacacgtggctcttcagtgtcactatcgtcgtgggtttaacaatttcatgctgtacaaagaagacagaagccacgttcccatcttccacggcagaatattccaggagagcttcatcatgggccctgtgaccccagcacatgcagggacctacagatgtcggggttcacgcccacactccctcactgggtggtcggcacccagcaaccccctggtgatcatggtcacaggaaaccacagaaaaccttccctcctggcccacccagggcccctgctgaaatcaggagagacagtcatcctgcaatgttggtcagatgtcatgtttgagcacttctttctgcacagagaggggatctctgaggacccctcacgcctcgttggacagatccatgatggggtctccaaggccaacttctccatcggtcccttgatgcctgtccttgcaggaacctacagatgttatggttctgttcctcactccccctatcagttgtcagctcccagtgaccccctggacatcgtgatcacaggtctatatgagaaaccttctctctcagcccagccgggccccacggttcaggcaggagagaacgtgaccttgtcctgtagctcctggagctcctatgacatctaccatctgtccagggaaggggaggcccatgaacgtaggctccgtgcagtgcccaaggtcaacagaacattccaggcagactttcctctgggccctgccacccacggagggacctacagatgcttcggctctttccgtgccctgccctgcgtgtggtcaaactcaagtgacccactgcttgtttctgtcacaggaaacccttcaagtagttggccttcacccacagaaccaagctccaaatctggtatctgcagacacctgcatgttctgattgggacctcagtggtcatcttcctcttcatcctcctcctcttctttctcctttatcgctggtgctccaacaaaaagaatgctgctgtaatggaccaagagcctgcgggggacagaacagtgaataggcaggactctgatgaacaagaccctcaggaggtgacgtacgcacagttggatcactgcgttttcatacagagaaaaatcagtcgcccttctcagaggcccaagacacccctaacagataccagcgtgtacacggaacttccaaatgctgagcccagatccaaagttgtctcctgcccacgagcaccacagtcaggtcttgagggggttttctagggagacaacagccctgtctcaaaaccaggttgccagatccaatgaaccagcagctggaatctgaaggcatcagtctgcatcttaggggatcgctcttcctcacaccacgaatctgaacatgcctctctcttgcttacaaatgcctaaggtcgccactgcctgctgcagagaaaacacactcctttgcttagcccacaagtatctatttcacttgacccctgcccacctctccaacctaactggcttacttcctagtcctacttgaggctgcaatcacactgaggaactcacaattccaaacatacaagaggctccctcttaacacggcacttacacacttgctgttccaccttccctcatgctgttccacctcccctcagactatctttcagccttctgtcatcagtaaaatttataaattttttttataacttcagtgtagctctctcctcttcaaataaacatgtctgccctcatggtttcg

SEQ ID NO: 115 - DNA, 1691 bp, Homo sapiens
gtctgcaccggcagcaccatgtcgctcatggtcgtcagcatggcgtgtgttgggttcttcttgctggaggggccctggccacatgtgggtggtcaggacaagcccttcctctctgcctggcccggcactgtggtgtctgaaggacaacatgtgactcttcagtgtcgctctcgtcttgggtttaacgaattcagtctgtccaaagaagacgggatgcctgtccctgagctctacaacagaatattccggaacagctttctcatgggccctgtgaccccagcacatgcagggacctacagatgttgcagttcacacccacactcccccactgggtggtcggcacccagcaaccctgtggtgatcatggtcacaggagtccacagaaaaccttccctcctggcccacccaggtcccctggtgaaatcgggagagacggtcatcctgcaatgttggtcagatgtcaggtttgagcgcttccttctgcacagagaggggatcactgaggaccccttgcgcctcgttggacagctccacgatgcgggttcccaggtcaactattccatgggtcccatgacacctgcccttgcagggacctacagatgctttggttctgtcactcacttaccctatgagttgtcggctcccagtgaccctctggacatcgtggtcgtaggtctatatgggaaaccttctctctcagcccagccgggccccacggttcaggcaggagagaatgtgaccttgtcctgcagctcccggagcttgtttgacatttaccatctatccagggaggcagaggccggtgaacttaggctcactgcggtgctgagggtcaatggaacattccaggccaacttccctctgggccctgtgacccacggagggaactacagatgcttcggctctttccgtgccctgccccacgcgtggtcagacccgagtgacccactgcccgtttctgtcacaggtaactccagacacctgcacgttctgattgggacctcagtggtcatcatcccctttgctatcctcctcttctttctccttcatcgctggtgtgccaacaaaaagaatgctgttgtaatggaccaagagcctgcagggaacagaacagtgaacagggaggactctgatgaacaagaccctcaggaggtgacatacgcacagttgaatcactgcgttttcacacagagaaaaatcactcgcccttctcagaggcccaagacacccccaacagataccagcgtgtaacacggaacttccaaatgctgagcgcagatccaaagttgtcttctgtccactagcaccacagtcaggccttgatgggatcttctagggagacaatagccctgtctcaaaaccgggttgccagctcccatgtaccagcagctggactctgaaggcgtgagtctgcatcttagggcatcgctcttcctcacaccacgaatctgaacatgcctctctcttgcttacaaatgtctaaggtccccactgcctgctggagagaaaacacacttgcttagcccacaattctccatttcacttgacccctgcccacctctccaacctaactggcttacttcctagtctacttgaggctgcgatcacactgaggaactcacaattccaaacatataagaggctccctcttaacacggcacttagatacgtgctattccacctttcctcag

SEQ ID NO: 116 - DNA, 1598 bp, Homo sapiens
gagctcggtcgcggctgcctgtctgctccggcagcaccatgtcgctcttggtcgtcagcatggcgtgtgttgggttcttcttgctgcagggggcctggccacatgagggagtccacagaaaaccttccctcctggcccacccaggtcgcctggtgaaatcagaagagacagtcatcctgcagtgttggtcagatgtcatgtttgaacacttccttctgcacagagaggggatgtttaacgacactttgcgcctcattggagaacaccatgatggggtctccaaggccaacttctccatcagtcgcatgacgcaagacctggcagggacctacagatgctacggttctgttactcactccccctatcaggtgtcagctcccagtgaccctctggacatcgtgatcataggtctatatgagaaaccttctctctcagcccagctgggccccacggttctggcaggagagaatgtgaccttgtcctgcagctcccggagctcctatgacatgtaccatctatccagggaaggggaggcccatgaacgtaggctccctgcagggcccaaggtcaacggaacattccaggctgactttcctctgggccctgccacccacggagggacctacagatgcttcggctctttccatgactctccatacgagtggtcaaagtcaagtgacccactgcttgtttctgtcacaggaaacccttcaaatagttggccttcacccactgaaccaagctccaaaaccggtaacccccgacacctgcacattctgattgggacctcagtggtcatcatcctcttcatcctcctcttctttctccttcatcgctggtgctccaacaaaaaaaatgctgcggtaatggaccaagagtctgcaggaaacagaacagcgaatagcgaggactctgatgaacaagaccctcaggaggtgacatacacacagttgaatcactgcgttttcacacagagaaaaatcactcgcccttctcagaggcccaagacacccccaacagatatcatcgtgtacacggaacttccaaatgctgagtccagatccaaagttgtctcctgcccatgagcaccacagtcaggccttgagggcgtcttctagggagacaacagccctgtctcaaaaccgggttgccagctcccatgtaccagcagctggaatctgaaggcgtgagtctgcatcttagggcatcgatcttcctcacaccacaaatctgaatgtgcctctctcttgcttacaaatgtctaaggtccccactgcctgctggagaaaaaacacactcctttgcttaacccacagttctccatttcacttgacccctgcccacctctccaacctaactggcttacttcctagtctacttgaggctgcaatcacactgaggaactcacaattccaaacatacaagaggctccctcttaacgcagcacttagacacgtgttgttccaccttccctcatgctgttccacctcccctcagactagctttcagtcttctgtcagcagtaaaacttatatattttttaaaataacttcaatgtagttttccatccttcaaataaacatgtctgcccccatggt

SEQ ID NO: 117 - DNA, 1101 bp, Homo sapiens
caccggcagcaccatgtcgctcacggtcgtcagcatggcgtgtgttgggttcttcttgctgcagggggcctggccacatgagggagtccacagaaaaccttccctcctggcccacccaggtcgcctggtgaaatcagaagagacagtcatcctgcaatgttggtcagatgtcatgtttgaacacttccttctgcacagagaggggatgtttaacgacactttgcgcctcattggagaacaccatgatggggtctccaaggccaacttctccatcagtcgcatgaagcaagacctggcagggacctacagatgctacggttctgttactcactccccctatcagttgtcagctcccagtgaccctctggacatcgtgatcataggtctatatgagaaaccttctctctcagcccagccgggccccacggttctggcaggagagaatgtgaccttgtcctgcagctcccggagctcctatgacatgtaccatctatccagggaaggggaggcccatgaacgtaggctccctgcagggaccaaggtcaacggaacattccaggccaactttcctctgggccctgccacccatggagggacctacagatgcttcggctctttccgtgactctccatacgagtggtcaaagtcaagtgacccactgcttgtttctgtcacaggaaacccttcaaatagttggccttcacccactgaaccaagctccgaaaccggtaaccccagacacctacatgttctgattgggacctcagtggtcaaaatccctttcaccatcctcctcttctttctccttcatcgctggtgctccgacaaaaaaaatgctgctgtaatggaccaagagcctgcagggaacagaacagtgaacagcgaggattctgatgaacaagaccatcaggaggtgtcatacgcataattggatcactgtgttttcacacagagaaaaatcactcgcccttctgagaggcccaagacacccccaacagataccagcatgtacatagaacttccaaatgctgagcccagatccaaagttgtcttctgtccacgagcaccacagtcaggccttgaggggatcttctagggaga

SEQ ID NO: 118 - DNA, 1986 bp, Homo sapiens
ataacatcctgtgcgctgctgagctgagctggggcgcagccgcctgtctgcaccggcagcaccatgtcgctcatggtcgtcagcatggcgtgtgttgggttgttcttggtccagagggccggtccacacatgggtggtcaggacaaacccttcctgtctgcctggcccagcgctgtggtgcctcgaggaggacacgtgactcttcggtgtcactatcgtcataggtttaacaatttcatgctatacaaagaagacagaatccacattcccatcttccatggcagaatattccaggagagcttcaacatgagccctgtgaccacagcacatgcagggaactacacatgtcggggttcacacccacactcccccactgggtggtcggcacccagcaaccccgtggtgatcatggtcacaggaaaccacagaaaaccttccctcctggcccacccaggtcccctggtgaaatcaggagagagagtcatcctgcaatgttggtcagatatcatgtttgagcacttctttctgcacaaagaggggatctctaaggacccctcacgcctcgttggacagatccatgatggggtctccaaggccaatttctccatcggtcccatgatgcttgcccttgcagggacctacagatgctacggttctgttactcacaccccctatcagttgtcagctcccagtgatcccctggacatcgtggtcacaggtccatatgagaaaccttctctctcagcccagccgggccccaaggttcaggcaggagagagcgtgaccttgtcctgtagctcccggagctcctatgacatgtaccatctatccagggaggggggagcccatgaacgtaggctccctgcagtgcgcaaggtcaacagaacattccaggcagatttccctctgggccctgccacccacggagggacctacagatgcttcggctctttccgtcactctccctacgagtggtcagacccgagtgacccactgcttgtttctgtcacaggaaacccttcaagtagttggccttcacccacagaaccaagctccaaatctggtaaccccagacacctgcacattctgattgggacctcagtggtcatcatcctcttcatcctcctcctcttctttctccttcatctctggtgctccaacaaaaaaaatgctgctgtaatggaccaagagcctgcagggaacagaacagccaacagcgaggactctgatgaacaagaccctgaggaggtgacatacgcacagttggatcactgcgttttcacacagagaaaaatcactcgcccttctcagaggcccaagacaccccctacagataccatcttgtacacggaacttccaaatgctaagcccagatccaaagttgtctcctgcccatgagcaccacagtcaggccttgaggacgtcttctagggagacaacagccctgtctcaaaaccgagttgccagctcccatgtaccagcagctggaatctgaaggcgtgagtcttcatcttagggcatcgctcctcctcacgccacaaatctggtgcctctctcttgcttacaaatgtctaggtccccactgcctgctggaaagaaaacacactcctttgcttagcccacagttctccatttcacttgacccctgcccacctctccaacctaactggcttacttcctagtctacttgaggctgcaatcacactgaggaactcacaattccaaacatacaagaggctccctcttgacgtggcacttacccacgtgctgttccaccttccctcatgctgtttcacctttcttcggactattttccagccttctgtcagcagtgaaacttataaaattttttgtgatttcaatgtagctgtctcctcttcaaataaacatgtctgccctcaaaaaaaaaaaaaaaaaaaaaaaaaaaaaaaaaaaaaaaaaaaaaaaaaaaaaaaaaaaaaaaaaaaaaaaaaaaaaaaaaaaaaa

SEQ ID NO: 119 - DNA, 1586 bp, Homo sapiens
gctgagctgagctggggcgcggccgcctgtctgcaccggcagcaccatgtcgctcatggtcatcatcatggcgtgtgttgggttcttcttgctgcagggggcctggccacaggagggagtccacagaaaaccttccttcctggccctcccaggtcacctggtgaaatcagaagagacagtcatcctgcaatgttggtcggatgtcatgtttgagcacttccttctgcacagagaggggaagtttaacaacactttgcacctcattggagagcaccatgatggggtttccaaggccaacttctccattggtcccatgatgcctgtccttgcaggaacctacagatgctacggttctgttcctcactccccctatcagttgtcagctcccagtgaccctctggacatggtgatcataggtctatatgagaaaccttctctctcagcccagccgggccccacggttcaggcaggagagaatgtgaccttgtcctgcagctcccggagctcctatgacatgtaccatctatccagggaaggggaggcccatgaacgtaggctccctgcagtgcgcagcatcaacggaacattccaggccgactttcctctgggccctgccacccacggagggacctacagatgcttcggctctttccgtgacgctccctacgagtggtcaaactcgagtgatccactgcttgtttccgtcacaggaaacccttcaaatagttggccttcacccactgaaccaagctccaaaaccggtaaccccagacacctacatgttctgattgggacctcagtggtcaaaatccctttcaccatcctcctcttctttctccttcatcgctggtgctccgacaaaaaaaatgctgctgtaatggaccaagagcctgcagggaacagaacagtgaacagcgaggattctgatgaacaagaccatcaggaggtgtcatacgcataattggatcactgtgttttcacacagagaaaaatcactcgcccttctgagaggcccaagacacccccaacagataccagcatgtacatagaacttccaaatgctgagcccagatccaaagttgtcttctgtccacgagcaccacagtcaggccttgaggggatcttctagggagacaacagccctgtctcaaaaccgggttgccagctcccatgtaccagcagctggaatctgaaggcatcagtcttcatcttagggcatcgctcttcctcacaccacgaatctgaacatgcctctctcttgcttacaaatgtctaaggtccccactgcctgctggagagaaaacacactcctttgcttagcccacaattctccatttcacttgacccctgcccacctctccaacctaactggcttacttcctagtctacctgaggctgcaatcacactgaggaactcacaattccaaacatacaagaggctgcctcttaacacagcacttagacacgtgctgttccacctcccttcagactatctttcagccttctgccagcagtaaaacttataaattttttaaataatttcaatgtagttttcccgccttcaaataaacatgtctgccctcatg

SEQ ID NO: 120 - DNA, 1596 bp, Homo sapiens
ctgtgcgctgctgagctgagctggggcgcggccgcctgtctgcaccggcagcaccatgtcgctcatggtcatcagcatggcgtgtgttgggttcttcttgctgcagggggcctggacacatgagggtggtcaggacaagcccttgctgtctgcctggcccagcgctgtggtgcctcgaggaggacatgtgactcttctgtgtcgctctcgtcttgggtttaccatcttcagtctgtacaaagaagatggggtgcctgtccctgagctctacaacaaaatattctggaagagcatcctcatgggccctgtgacccctgcacacgcagggacctacagatgtcggggttcacacccacgctcccccattgagtggtcagcacccagcaaccccctggtgatcgtggtcacaggtctatttgggaaaccttcactctcagcccagccgggccccacggttcgcacaggagagaacgtgaccttgtcctgcagctccaggagctcatttgacatgtaccatctatccagggaggggagggcccatgaacctaggctccctgcagtgcccagcgtcaatggaacattccaggctgactttcctctgggccctgccacccacggagggacctacacatgcttcggctctctccatgactcaccctatgagtggtcagacccgagtgacccactgcttgtttctgtcacaggaaactcttcaagtagttcatcttcacccactgaaccaagctccaaaactggtatccgcagacacctgcacattctgattgggacctcagtggctatcatcctcttcatcatcctcttcttctttctccttcattgctgctgctccaacaaaaagaatgctgctgtaatggaccaagagcctgccggggacagaacagtgaacagggaggactctgatgatcaagaccctcaggaggtgacatatgcacagttggatcactgcgttttcacacagacaaaaatcacttccccttctcagaggcccaagacacctccaacagataccaccatgtacatggaacttccaaatgctaagccaagatcattgtctcctgcccataagcaccacagtcaggccttgaggggatcttctagggagacaacagccctgtctcaaaaccgggttgctagctcccatgtaccagcagctggaatctgaaggcatcagtcttcatcttaggggatcgctcttcctcacaccacaaatctgaacatgcctctctcttgcttacaaatgtctaaggtccccactgcctgctggagagaagacacactcctttgcttagcccacaattctctatttcacttgacccctgcccacctctccaactgaactggcttacttcctagtctacttgaggctgcaatcacactgaggaactcacaattccagacatacaagaggctccctcttaacatggcactgagacacgtgctgttccaccttccctcatgctgtttcacctttcctcagactattttccagccttctgtcagtcagcagtgaaacttataaaattttttgtgatttcaatgtagctgtctccttttcaaataaacatgtctgccctc

SEQ ID NO: 121 - DNA, 1609 bp, Homo sapiens
tcgagccgagtcactgcgtcctggcagcagaagctgcaccatgtccatgtcacccacggtcatcatcctggcatgtcttgggttcttcttggaccagagtgtgtgggcacacgtgggtggtcaggacaagcccttctgctctgcctggcccagcgctgtggtgcctcaaggaggacacgtgactcttcggtgtcactatcgtcgtgggtttaacatcttcacgctgtacaagaaagatggggtccctgtccctgagctctacaacagaatattctggaacagtttcctcattagccctgtgaccccagcacacgcagggacctacagatgtcgaggttttcacccgcactcccccactgagtggtcggcacccagcaaccccctggtgatcatggtcacaggtctatatgagaaaccttcgcttacagcccggccgggccccacggttcgcgcaggagagaacgtgaccttgtcctgcagctcccagagctcctttgacatctaccatctatccagggagggggaagcccatgaacttaggctccctgcagtgcccagcatcaatggaacattccaggccgacttccctctgggtcctgccacccacggagagacctacagatgcttcggctctttccatggatctccctacgagtggtcagacccgagtgacccactgcctgtttctgtcacaggaaacccttctagtagttggccttcacccactgaaccaagcttcaaaactggtatcgccagacacctgcatgctgtgattaggtactcagtggccatcatcctctttaccatccttcccttctttctccttcatcgctggtgctccaaaaaaaaaatgctgctgtaatgaaccaagagcctgcgggacacagaacagtgaacagggaggactctgatgaacaagaccctcaggaggtgacatacgcacagttggatcactgcattttcacacagagaaaaatcactggcccttctcagaggagcaagagaccctcaacagataccagcgtgtgtatagaacttccaaatgctgagcccagagcgttgtctcctgcccatgagcaccacagtcaggccttgatgggatcttctagggagacaacagccctgtctcaaacccagcttgccagctctaatgtaccagcagctggaatctgaaggcgtgagtctccatcttagagcatcactcttcctcacaccacaaatctggtgcctgtctcttgcttaccaatgtctaaggtccccactgcctgctgcagagaaaacacactcctttgcttagcccacaattctctatttcacttgacccctgcccacctctccaacctaactggcttacttcctagtctacttgaggctgcaatcacactgaggaactcacaattccaaacatacaagaggctctctcttaacacggcacttagacacgtgctgttccaccttccctcgtgctgttccacctttcctcagactatttttcagccttctggcatcagcaaaccttataaaatttttttgatttcagtgtagttctctcctcttcaaataaacatgtctgccttcaaaaaaaaaaaaaaaaaaaaaaaaaaaaaaa

SEQ ID NO: 122 - DNA, 1610 bp, Homo sapiens
tcgagccgagtcactgcgtcctggcagcagaagctgcaccatgtccatgtcacccacggtcatcatcctggcatgtcttgggttcttcttggaccagagtgtgtgggcacacgtgggtggtcaggacaagcccttctgctctgcctggcccagcgctgtggtgcctcaaggaggacacgtgactcttcggtgtcactatcgtcgtgggtttaacatcttcacgctgtacaagaaagatggggtccctgtccctgagctctacaacagaatattctggaacagtttcctcattagccctgtgaccccagcacacgcagggacctacagatgtcgaggttttcacccgcactcccccactgagtggtcggcacccagcaaccccctggtgatcatggtcacaggtctatatgagaaaccttcgcttacagcccggccgggccccacggttcgcgcaggagagaacgtgaccttgtcctgcagctcccagagctcctttgacatctaccatctatccagggagggggaagcccatgaacttaggctccctgcagtgcccagcatcaatggaacattccaggccgacttccctctgggtcctgccacccacggagagacctacagatgcttcggctctttccatggatctccctacgagtggtcagacccgagtgacccactgcctgtttctgtcacaggaaacccttctagtagttggccttcacccactgaaccaagcttcaaaactggtatcgccagacacctgcatgctgtgattaggtactcagtggccatcatcctctttaccatccttcccttctttctccttcatcgctggtgctccaaaaaaaaaaatgctgctgtaatgaaccaagagcctgcgggacacagaacagtgaacagggaggactctgatgaacaagaccctcaggaggtgacatacgcacagttggatcactgcattttcacacagagaaaaatcactggcccttctcagaggagcaagagaccctcaacagataccagcgtgtgtatagaacttccaaatgctgagcccagagcgttgtctcctgcccatgagcaccacagtcaggccttgatgggatcttctagggagacaacagccctgtctcaaacccagcttgccagctctaatgtaccagcagctggaatctgaaggcgtgagtctccatcttagagcatcactcttcctcacaccacaaatctggtgcctgtctcttgcttaccaatgtctaaggtccccactgcctgctgcagagaaaacacactcctttgcttagcccacaattctctatttcacttgacccctgcccacctctccaacctaactggcttacttcctagtctacttgaggctgcaatcacactgaggaactcacaattccaaacatacaagaggctctctcttaacacggcacttagacacgtgctgttccaccttccctcgtgctgttccacctttcctcagactatttttcagccttctggcatcagcaaaccttataaaatttttttgatttcagtgtagttctctcctcttcaaataaacatgtctgccttcaaaaaaaaaaaaaaaaaaaaaaaaaaaaaaa

SEQ ID NO: 123 - DNA, 1741 bp, Homo sapiens
ccggcagcaccatgttgctcatggtcgtcagcatggcgtgtgttgggttgttcttggtccagagggccggtccacacatgggtggtcaggacaagcccttcctgtctgcctggcccagcgctgtggtgcctcgcggaggacacgtgactcttcggtgtcactatcgtcataggtttaacaatttcatgctatacaaagaagacagaatccacgttcccatcttccatggcagaatattccaggagggcttcaacatgagccctgtgaccacagcacatgcagggaactacacatgtcggggttcacacccacactcccccactgggtggtcggcacccagcaaccccatggtgatcatggtcacaggaaaccacagaaaaccttccctcctggcccacccaggtcccctggtgaaatcaggagagagagtcatcctgcaatgttggtcagatatcatgtttgagcacttctttctgcacaaagagtggatctctaaggacccctcacgcctcgttggacagatccatgatggggtctccaaggccaatttctccatcggttccatgatgcgtgcccttgcagggacctacagatgctacggttctgttactcacaccccctatcagttgtcagctcccagtgatcccctggacatcgtggtcacaggtctatatgagaaaccttctctctcagcccagccgggccccaaggttcaggcaggagagagcgtgaccttgtcctgtagctcccggagctcctatgacatgtaccatctatccagggaggggggagcccatgaacgtaggctccctgcagtgcgcaaggtcaacagaacattccaggcagatttccctctgggccctgccacccacggagggacctacagatgcttcggctctttccgtcactctccctacgagtggtcagacccgagtgacccactgcttgtttctgtcacaggaaacccttcaagtagttggccttcacccacagaaccaagctccaaatctggtaacctcagacacctgcacattctgattgggacctcagtggtcaaaatccctttcaccatcctcctcttctttctccttcatcgctggtgctccaacaaaaaaaaatgctgctgtaatggaccaagagcctgcagggaacagaagtgaacagcgaggattctgatgaacaagaccatcaggaggtgtcatacgcataattggaacactgtgttttcacacagagaaaaatcactcgcccttctcagaggcccaagacacccccaacagataccagcatgtacatagaacttccaaatgctgagcccagatccaaagttgtcttctgtccacgagcaccacagtcaggccttgaggggatcttctagggagacaacagccctgtctcaaaactgggttgccagctcccatgtaccagcagctggaatctgaaggcatcagtcttcatcttagggcatcgctcttcctcacaccacaaatctgaatgtgcctctcacttgcttacaaatgtctaaggtccccactgcctgctggagaaaaaacacactcctttgcttagcccacagttctccatttcacttgacccctgcccacctctccaacctaactggcttacttcctagtctacttgaggctgcaatcacactgaggaactcacaattccacacatacaagaggctccgtcttaacgcagcacttagacacgtgctgttccaccttccctcatgctg

SEQ ID NO: 124 - DNA, 1632 bp, Homo sapiens
atgtcgctcatggtcatcagcatggcgtgtgttgggttcttcttgctgcagggggcctggacacatgagggtggacaggacaagcccttgctgtctgcctggcccagcgctgtggtgcctcgaggaggacatgtgactcttctgtgtcgctctcgtcttgggtttaccatcttcagtctgtacaaagaagatggggtgcctgtccctgagctctacaacaaaatattctggaagagcatcctcatgggccctgtgacccctgcacacgcagggacctacagatgtcggggttcacacccgcgctcccccattgagtggtcggcacccagcaaccccctggtgatcgtggtcacaggtctatttgggaaaccttcactctcagcccagccgggccccacggttcgcacaggagagaacgtggccttgtcctgcagctccaggagctcatttgacatgtaccatctatccagggaggggagggcccatgaacctaggctccctgcagtgcccagcgtcgatggaacattccaggctgactttcctctgggccctgccacccacggagggacctacacatgcttcagctctctccatgactcaccctatgagtggtcagacccgagtgacccactgcttgtttctgtcacaggaaactcttcaagtagttcatcttcacccactgaaccaagctccaaaactggtatccgcagacacctgcacattctgattgggacctcagtggctatcatcctcttcatcatcctcttcttctttctccttcattgctgctgctccaacaaaaagaatgctgctgtaatggaccaagggcctgccggggacagaacagtgaacagggaggactctgatgatcaagaccctcaggaggtgacatatgcacagttggatcactgcgttttcacacagacaaaaatcacttccccttctcagaggcccaaggcacctccaacagataccaccatgtacatggaacttccaaatgctaagccaagatcattgtctcctgcccataagcaccacagtcaggccttgaggggatcttctagggagacaacagccctgtctcaaaaccgggttgctagctcccatgtaccagcagctggaatctgaaggcatcagtcttcatcttaggggatcgctcttcctcacaccacaaatctgaacatgcctctctcttgcttacaaatgtctaaggtccccactgcctgctggagagaagacacacacctttgcttagcccacaattctctatttcacttgacccctgcccacctctccaactgaactggcttacttcctagtctacttgaggctgcaatcacactgaggaactcacaattccagacatacaagaggctccctcttaacatggcactgagacacgtgctgttccaccctccctcatgctgtttcacctttcctcagactattttccagccttctgtcagtcagcagtgaaacttataaaattttttgtgatttcaatgtagctgtctccttttcaaataaacatgtctgccctcattgctttaggtaatgtgacactattcgctgaaagaaaccgctgttatcattaccatgtccacataaccccatctgttatccactgggttc

SEQ ID NO: 125 - DNA, 1834 bp, Homo sapiens
ggggcgcggcctcctgtctgcaccggcagcaccatgtcgctcacggtcgtcagcatggcgtgcgttgggttcttcttgctgcagggggcctggccactcatgggtggtcaggacaaacccttcctgtctgcccggcccagcactgtggtgcctcgaggaggacacgtggctcttcagtgtcactatcgtcgtgggtttaacaatttcatgctgtacaaagaagacagaagccacgttcccatcttccacggcagaatattccaggagagcttcatcatgggccctgtgaccccagcacatgcagggacctacagatgtcggggttcacgcccacactccctcactgggtggtcggcacccagcaaccccctggtgatcatggtcacaggaaaccacagaaaaccttccctcctggcccacccagggcccctgctgaaatcaggagagacagtcatcctgcaatgttggtcagatgtcatgtttgagcacttctttctgcacagagaggggatctctgaggacccctcacgcctcgttggacagatccatgatggggtctccaaggccaacttctccatcggtcccttgatgcctgtccttgcaggaacctacagatgttatggttctgttcctcactccccctatcagttgtcagctcccagtgaccccctggacatcgtgatcacaggtctatatgagaaaccttctctctcagcccagccgggccccacggttcaggcaggagagaacgtgaccttgtcctgtagctcctggagctcctatgacatctaccatctgtccagggaaggggaggcccatgaacgtaggctccgtgcagtgcccaaggtcaacagaacattccaggcagactttcctctgggccctgccacccacggagggacctacagatgcttcggctctttccgtgccctgccctgcgtgtggtcaaactcaagtgacccactgcttgtttctgtcacaggtatctgcagacacctgcatgttctgattgggacctcagtggtcatcttcctcttcatcctcctcctcttctttctcctttatcgctggtgctccaacaaaaagaatgctgctgtaatggaccaagagcctgcgggggacagaacagtgaataggcaggactctgatgaacaagaccctcaggaggtgacgtacgcacagttggatcactgcgttttcatacagagaaaaatcagtcgcccttctcagaggcccaagacacccctaacagataccagcgtgtacacggaacttccaaatgctgagcccagatccaaagttgtctcctgcccacgagcaccacagtcaggtcttgagggggttttctagggagacaacagccctgtctcaaaaccaggttgccagatccaatgaaccagcagctggaatctgaaggcatcagtctgcatcttaggggatcgctcttcctcacaccacgaatctgaacatgcctctctcttgcttacaaatgcctaaggtcgccactgcctgctgcagagaaaacacactcctttgcttagcccacaagtatctatttcacttgacccctgcccacctctccaacctaactggcttacttcctagtcctacttgaggctgcaatcacactgaggaactcacaattccaaacatacaagaggctccctcttaacacggcacttacacacttgctgttccaccttccctcatgctgttccacctcccctcagactatctttcagccttctgtcatcagtaaaatttataaattttttttataacttcagtgtagctctctcctcttcaaataaacatgtctgccctcatggtttcg

SEQ ID NO: 126 - DNA, 1113 bp, Homo sapiens
ccggcagcaccatgtcgctcatggtcatcagcatggcatgtgttgggttcttctggctgcagggggcctggccacatgagggattccgcagaaaaccttccctcctggcccacccaggtcgcctggtgaaatcagaagagacagtcatcctgcaatgttggtcagatgtcatgtttgagcacttccttctgcacagagaggggacgtttaacgacactttgcgcctcattggagagcacattgatggggtctccaaggccaacttctccatcggtcgcatgaggcaagacctggcagggacctacagatgctacggttctgttcctcactccccctatcagttttcagctcccagtgaccctctggacatcgtgatcacaggtctatatgagaaaccttctctctcagcccagccgggccccacggttctggcaggagagagcgtgaccttgtcctgcagctcctggagctcctatgacatgtaccatctatccacggagggggaggcccatgaacgtaggttctctgcagggcccaaggtcaacggaacattccaggccgactttcctctgggccctgccacccaaggaggaacctacagatgcttcggctctttccatgactctccctacgagtggtcaaagtcaagtgacccactgcttgtttctgtcacaggaaacccttcaaatagttggccttcacccactgaaccaagctccaaaaccggtaaccccagacacctacacgttctgattgggacctcagtggtcaaactccctttcaccatcctcctcttctttctccttcatcgctggtgctccgacaaaaaaaatgcatctgtaatggaccaagggcctgcggggaacagaacagtgaacagggaggattctgacgaacaggaccatcaggaggtgtcatacgcataattggatcactgtgttttcacacagagaaaaatcactcccccttctcagaggcccaagacacccccaacagatagcagcatgtacatagaacttccaaatgctgagtccagatccaaagctgtcttctgtccacgagcaccacagtcaggccttgaggggatcttctagggagacaacagccctgtct

SEQ ID NO: 127 - protein, 44 aa, Homo sapiens
MSDKPDMAEIEKFDKSKLKKTETQEKNPLPSKETIEQEKQAGES

SEQ ID NO: 128 - protein, 44 aa, Homo sapiens
MSDKPGMAEIEKFDKSKLKKTETQEKNPLSSKETIEQERQAGES

SEQ ID NO: 129 - protein, 420 aa, Homo sapiens
MSERKEGRGKGKGKKKERGSGKKPESAAGSQSPALPPRLKEMKSQESAAGSKLVLRCETSSEYSSLRFKWFKNGNELNRKNKPQNIKIQKKPGKSELRINKASLADSGEYMCKVISKLGNDSASANITIVESNEIITGMPASTEGAYVSSESPIRISVSTEGANTSSSTSTSTTGTSHLVKCAEKEKTFCVNGGECFMVKDLSNPSRYLCKCPNEFTGDRCQNYVMASFYKAEELYQKRVLTITGICIALLVVGIMCVVAYCKTKKQRKKLHDRLRQSLRSERNNMMNIANGPHHPNPPPENVQLVNQYVSKNVISSEHIVEREAETSFSTSHYTSTAHHSTTVTQTPSHSWSNGHTESILSESHSVIVMSSVENSRHSSPTGGPRGRLNGTGGPRECNSFLRHARETPDSYRDSPHSER

SEQ ID NO: 130 - protein, 207 aa, Homo sapiens
MSERKEGRGKGKGKKKERGSGKKPESAAGSQSPALPPRLKEMKSQESAAGSKLVLRCETSSEYSSLRFKWFKNGNELNRKNKPQNIKIQKKPGKSELRINKASLADSGEYMCKVISKLGNDSASANITIVESNATSTSTTGTSHLVKCAEKEKTFCVNGGECFMVKDLSNPSRYLCKCPNEFTGDRCQNYVMASFYSTSTPFLSLPE

SEQ ID NO: 131 - protein, 194 aa, Homo sapiens
MSERKEGRGKGKGKKKERGSGKKPESAAGSQSPALPPRLKEMKSQESAAGSKLVLRCETSSEYSSLRFKWFKNGNELNRKNKPQNIKIQKKPGKSELRINKASLADSGEYMCKVISKLGNDSASANITIVESNEIITGMPASTEGAYVSSATSTSTTGTSHLVKCAEKEKTFCVNGGECFMVKDLSNPSRYLCK

SEQ ID NO: 132 - protein, 624 aa, Homo sapiens
MGKGRAGRVGTTALPPRLKEMKSQESAAGSKLVLRCETSSEYSSLRFKWFKNGNELNRKNKPQNIKIQKKPGKSELRINKASLADSGEYMCKVISKLGNDSASANITIVESNEIITGMPASTEGAYVSSESPIRISVSTEGANTSSSTSTSTTGTSHLVKCAEKEKTFCVNGGECFMVKDLSNPSRYLCKCPNEFTGDRCQNYVMASFYKHLGIEFMEAEELYQKRVLTITGICIALLVVGIMCVVAYCKTKKQRKKLHDRLRQSLRSERNNMMNIANGPHHPNPPPENVQLVNQYVSKNVISSEHIVEREAETSFSTSHYTSTAHHSTTVTQTPSHSWSNGHTESILSESHSVIVMSSVENSRHSSPTGGPRGRLNGTGGPRECNSFLRHARETPDSYRDSPHSERYVSAMTTPARMSPVDFHTPSSPKSPPSEMSPPVSSMTVSMPSMAVSPFMEEERPLLLVTPPRLREKKFDHHPQQFSSFHHNPAHDSNSLPASPLRIVEDEEYETTQEYEPAQEPVKKLANSRRAKRTKPNGHIANRLEVDSNTSSQSSNSESETEDERVGEDTPFLGIQNPLAASLEATPAFRLADSRTNPAGRFSTQEEIQARLSSVIANQDPIAV

SEQ ID NO: 133 - protein, 607 aa, Homo sapiens
MGKGRAGRVGTTALPPRLKEMKSQESAAGSKLVLRCETSSEYSSLRFKWFKNGNELNRKNKPQNIKIQKKPGKSELRINKASLADSGEYMCKVISKLGNDSASANITIVESNEIITGMPASTEGAYVSSATSTSTTGTSHLVKCAEKEKTFCVNGGECFMVKDLSNPSRYLCKCPNEFTGDRCQNYVMASFYKHLGIEFMEAEELYQKRVLTITGICIALLVVGIMCVVAYCKTKKQRKKLHDRLRQSLRSERNNMMNIANGPHHPNPPPENVQLVNQYVSKNVISSEHIVEREAETSFSTSHYTSTAHHSTTVTQTPSHSWSNGHTESILSESHSVIVMSSVENSRHSSPTGGPRGRLNGTGGPRECNSFLRHARETPDSYRDSPHSERYVSAMTTPARMSPVDFHTPSSPKSPPSEMSPPVSSMTVSMPSMAVSPFMEEERPLLLVTPPRLREKKFDHHPQQFSSFHHNPAHDSNSLPASPLRIVEDEEYETTQEYEPAQEPVKKLANSRRAKRTKPNGHIANRLEVDSNTSSQSSNSESETEDERVGEDTPFLGIQNPLAASLEATPAFRLADSRTNPAGRFSTQEEIQARLSSVIANQDPIAV

SEQ ID NO: 134 - protein, 607 aa, Homo sapiens; identical to SEQ ID NO: 133

SEQ ID NO: 135 - protein, 637 aa, Homo sapiens
MSERKEGRGKGKGKKKERGSGKKPESAAGSQSPALPPRLKEMKSQESAAGSKLVLRCETSSEYSSLRFKWFKNGNELNRKNKPQNIKIQKKPGKSELRINKASLADSGEYMCKVISKLGNDSASANITIVESNEIITGMPASTEGAYVSSESPIRISVSTEGANTSSSTSTSTTGTSHLVKCAEKEKTFCVNGGECFMVKDLSNPSRYLCKCPNEFTGDRCQNYVMASFYKAEELYQKRVLTITGICIALLVVGIMCVVAYCKTKKQRKKLHDRLRQSLRSERNNMMNIANGPHHPNPPPENVQLVNQYVSKNVISSEHIVEREAETSFSTSHYTSTAHHSTTVTQTPSHSWSNGHTESILSESHSVIVMSSVENSRHSSPTGGPRGRLNGTGGPRECNSFLRHARETPDSYRDSPHSERYVSAMTTPARMSPVDFHTPSSPKSPPSEMSPPVSSMTVSMPSMAVSPFMEEERPLLLVTPPRLREKKFDHHPQQFSSFHHNPAHDSNSLPASPLRIVEDEEYETTQEYEPAQEPVKKLANSRRAKRTKPNGHIANRLEVDSNTSSQSSNSESETEDERVGEDTPFLGIQNPLAASLEATPAFRLADSRTNPAGRFSTQEEIQARLSSVIANQDPIAV

SEQ ID NO: 136 - protein, 637 aa, Homo sapiens; identical to SEQ ID NO: 135

SEQ ID NO: 137 - protein, 211 aa, Homo sapiens
MSERKEGRGKGKGKKKERGSGKKPESAAGSQSPALPPRLKEMKSQESAAGSKLVLRCETSSEYSSLRFKWFKNGNELNRKNKPQNIKIQKKPGKSELRINKASLADSGEYMCKVISKLGNDSASANITIVESNEIITGMPASTEGAYVSSESPIRISVSTEGANTSSSTSTSTTGTSHLVKCAEKEKTFCVNGGECFMVKDLSNPSRYLCK

SEQ ID NO: 138 - protein, 296 aa, Homo sapiens
MEIYSPDMSEVAAERSSSPSTQLSADPSLDGLPAAEDMPEPQTEDGRTPGLVGLAVPCCACLEAERLRGCLNSEKICIVPILACLVSLCLCIAGLKWVFVDKIFEYDSPTHLDPGGLGQDPIISLDATAASAVWVSSEAYTSPVSRAQSESEVQVTVQGDKAVVSFEPSAAPTPKNRIFAFSFLPSTAPSFPSPTRNPEVRTPKSATQPQTTETNLQTAPKLSTSTSTTGTSHLVKCAEKEKTFCVNGGECFMVKDLSNPSRYLCKCPNEFTGDRCQNYVMASFYSTSTPFLSLPE

SEQ ID NO: 139 - protein, 422 aa, Homo sapiens
MRWRRAPRRSGRPGPRAQRPGSAARSSPPLPLLPLLLLLGTAALAPGAAAGNEAAPAGASVCYSSPPSVGSVQELAQRAAVVIEGKVHPQRRQQGALDRKAAAAAGEAGAWGGDREPPAAGPRALGPPAEEPLLAANGTVPSWPTAPVPSAGEPGEEAPYLVKVHQVWAVKAGGLKKDSLLTVRLGTWGHPAFPSCGRLKEDSRYIFFMEPDANSTSRAPAAFRASFPPLETGRNLKKEVSRVLCKRCALPPRLKEMKSQESAAGSKLVLRCETSSEYSSLRFKWFKNGNELNRKNKPQNIKIQKKPGKSELRINKASLADSGEYMCKVISKLGNDSASANITIVESNATSTSTTGTSHLVKCAEKEKTFCVNGGECFMVKDLSNPSRYLCKCPNEFTGDRCQNYVMASFYSTSTPFLSLPE

SEQ ID NO: 140 - protein, 177 aa, Homo sapiens
MSERKEGRGKGKGKKKERGSGKKPESAAGSQSPALPPRLKEMKSQESAAGSKLVLRCETSSEYSSLRFKWFKNGNELNRKNKPQNIKIQKKPGKSELRINKASLADSGEYMCKVISKLGNDSASANITIVESNATSTSTTGTSHLVKCAEKEKTFCVNGGECFMVKDLSNPSRYLCK

SEQ ID NO: 141 - protein, 459 aa, Homo sapiens
MSERKEGRGKGKGKKKERGSGKKPESAAGSQSPALPPRLKEMKSQESAAGSKLVLRCETSSEYSSLRFKWFKNGNELNRKNKPQNIKIQKKPGKSELRINKASLADSGEYMCKVISKLGNDSASANITIVESNEIITGMPASTEGAYVSSESPIRISVSTEGANTSSSTSTSTTGTSHLVKCAEKEKTFCVNGGECFMVKDLSNPSRYLCKCPNEFTGDRCQNYVMASFYKAEELYQKRVLTITGICIALLVVGIMCVVAYCKTKKQRKKLHDRLRQSLRSERNNMMNIANGPHHPNPPPENVQLVNQYVSKNVISSEHIVEREAETSFSTSHYTSTAHHSTTVTQTPSHSWSNGHTESILSESHSVIVMSSVENSRHSSPTGGPRGRLNGTGGPRECNSFLRHARETPDSYRDSPHSERHNLIAELRRNKAHRSKCMQIQLSATHLRSSSIPHLGFIL

SEQ ID NO: 142 - protein, 590 aa, Homo sapiens
MGKGRAGRVGTTALPPRLKEMKSQESAAGSKLVLRCETSSEYSSLRFKWFKNGNELNRKNKPQNIKIQKKPGKSELRINKASLADSGEYMCKVISKLGNDSASANITIVESNATSTSTTGTSHLVKCAEKEKTFCVNGGECFMVKDLSNPSRYLCKCPNEFTGDRCQNYVMASFYKHLGIEFMEAEELYQKRVLTITGICIALLVVGIMCVVAYCKTKKQRKKLHDRLRQSLRSERNNMMNIANGPHHPNPPPENVQLVNQYVSKNVISSEHIVEREAETSFSTSHYTSTAHHSTTVTQTPSHSWSNGHTESILSESHSVIVMSSVENSRHSSPTGGPRGRLNGTGGPRECNSFLRHARETPDSYRDSPHSERYVSAMTTPARMSPVDFHTPSSPKSPPSEMSPPVSSMTVSMPSMAVSPFMEEERPLLLVTPPRLREKKFDHHPQQFSSFHHNPAHDSNSLPASPLRIVEDEEYETTQEYEPAQEPVKKLANSRRAKRTKPNGHIANRLEVDSNTSSQSSNSESETEDERVGEDTPFLGIQNPLAASLEATPAFRLADSRTNPAGRFSTQEEIQARLSSVIANQDPIAV

SEQ ID NO: 143 - protein, 308 aa, Homo sapiens
MQIPKHISIEDITATSTSTTGTSHLVKCAEKEKTFCVNGGECFMVKDLSNPSRYLCKCQPGFTGARCTENVPMKVQNQEKAEELYQKRVLTITGICIALLVVGIMCVVAYCKTKKQRKKLHDRLRQSLRSERNNMMNIANGPHHPNPPPENVQLVNQYVSKNVISSEHIVEREAETSFSTSHYTSTAHHSTTVTQTPSHSWSNGHTESILSESHSVIVMSSVENSRHSSPTGGPRGRLNGTGGPRECNSFLRHARETPDSYRDSPHSERHNLIAELRRNKAHRSKCMQIQLSATHLRSSSIPHLGFIL

SEQ ID NO: 144 - protein, 241 aa, Homo sapiens
MSERKEGRGKGKGKKKERGSGKKPESAAGSQSPALPPRLKEMKSQESAAGSKLVLRCETSSEYSSLRFKWFKNGNELNRKNKPQNIKIQKKPGKSELRINKASLADSGEYMCKVISKLGNDSASANITIVESNEIITGMPASTEGAYVSSESPIRISVSTEGANTSSSTSTSTTGTSHLVKCAEKEKTFCVNGGECFMVKDLSNPSRYLCKCPNEFTGDRCQNYVMASFYSTSTPFLSLPE

SEQ ID NO: 145 - protein, 645 aa, Homo sapiens
MSERKEGRGKGKGKKKERGSGKKPESAAGSQSPALPPRLKEMKSQESAAGSKLVLRCETSSEYSSLRFKWFKNGNELNRKNKPQNIKIQKKPGKSELRINKASLADSGEYMCKVISKLGNDSASANITIVESNEIITGMPASTEGAYVSSESPIRISVSTEGANTSSSTSTSTTGTSHLVKCAEKEKTFCVNGGECFMVKDLSNPSRYLCKCPNEFTGDRCQNYVMASFYKHLGIEFMEAEELYQKRVLTITGICIALLVVGIMCVVAYCKTKKQRKKLHDRLRQSLRSERNNMMNIANGPHHPNPPPENVQLVNQYVSKNVISSEHIVEREAETSFSTSHYTSTAHHSTTVTQTPSHSWSNGHTESILSESHSVIVMSSVENSRHSSPTGGPRGRLNGTGGPRECNSFLRHARETPDSYRDSPHSERYVSAMTTPARMSPVDFHTPSSPKSPPSEMSPPVSSMTVSMPSMAVSPFMEEERPLLLVTPPRLREKKFDHHPQQFSSFHHNPAHDSNSLPASPLRIVEDEEYETTQEYEPAQEPVKKLANSRRAKRTKPNGHIANRLEVDSNTSSQSSNSESETEDERVGEDTPFLGIQNPLAASLEATPAFRLADSRTNPAGRFSTQEEIQARLSSVIANQDPIAV

SEQ ID NO: 146 - protein, 640 aa, Homo sapiens
MSERKEGRGKGKGKKKERGSGKKPESAAGSQSPALPPRLKEMKSQESAAGSKLVLRCETSSEYSSLRFKWFKNGNELNRKNKPQNIKIQKKPGKSELRINKASLADSGEYMCKVISKLGNDSASANITIVESNEIITGMPASTEGAYVSSESPIRISVSTEGANTSSSTSTSTTGTSHLVKCAEKEKTFCVNGGECFMVKDLSNPSRYLCKCQPGFTGARCTENVPMKVQNQEKAEELYQKRVLTITGICIALLVVGIMCVVAYCKTKKQRKKLHDRLRQSLRSERNNMMNIANGPHHPNPPPENVQLVNQYVSKNVISSEHIVEREAETSFSTSHYTSTAHHSTTVTQTPSHSWSNGHTESILSESHSVIVMSSVENSRHSSPTGGPRGRLNGTGGPRECNSFLRHARETPDSYRDSPHSERYVSAMTTPARMSPVDFHTPSSPKSPPSEMSPPVSSMTVSMPSMAVSPFMEEERPLLLVTPPRLREKKFDHHPQQFSSFHHNPAHDSNSLPASPLRIVEDEEYETTQEYEPAQEPVKKLANSRRAKRTKPNGHIANRLEVDSNTSSQSSNSESETEDERVGEDTPFLGIQNPLAASLEATPAFRLADSRTNPAGRFSTQEEIQARLSSVIANQDPIAV

SEQ ID NO: 147 - protein, 462 aa, Homo sapiens
MSERKEGRGKGKGKKKERGSGKKPESAAGSQSPALPPRLKEMKSQESAAGSKLVLRCETSSEYSSLRFKWFKNGNELNRKNKPQNIKIQKKPGKSELRINKASLADSGEYMCKVISKLGNDSASANITIVESNEIITGMPASTEGAYVSSESPIRISVSTEGANTSSSTSTSTTGTSHLVKCAEKEKTFCVNGGECFMVKDLSNPSRYLCKCQPGFTGARCTENVPMKVQNQEKAEELYQKRVLTITGICIALLVVGIMCVVAYCKTKKQRKKLHDRLRQSLRSERNNMMNIANGPHHPNPPPENVQLVNQYVSKNVISSEHIVEREAETSFSTSHYTSTAHHSTTVTQTPSHSWSNGHTESILSESHSVIVMSSVENSRHSSPTGGPRGRLNGTGGPRECNSFLRHARETPDSYRDSPHSERHNLIAELRRNKAHRSKCMQIQLSATHLRSSSIPHLGFIL

SEQ ID NO: 148 - protein, 232 aa, Homo sapiens
MNFLLSWVHWSLALLLYLHHAKWSQAAPMAEGGGQNHHEVVKFMDVYQRSYCHPIETLVDIFQEYPDEIEYIFKPSCVPLMRCGGCCNDEGLECVPTEESNITMQIMRIKPHQGQHIGEMSFLQHNKCECRPKKDRARQEKKSVRGKGKGQKRKRKKSRYKSWSVYVGARCCLMPWSLPGPHPCGPCSERRKHLFVQDPQTCKCSCKNTDSRCKARQLELNERTCRCDKPRR

SEQ ID NO: 149 - protein, 412 aa, Homo sapiens
MTDRQTDTAPSPSYHLLPGRRRTVDAAASRGQGPEPAPGGGVEGVGARGVALKLFVQLLGCSRFGGAVVRAGEAEPSGAARSASSGREEPQPEEGEEEEEKEEERGPQWRLGARKPGSWTGEAAVCADSAPAARAPQALARASGRGGRVARRGAEESGPPHSPSRRGSASRAGPGRASETMNFLLSWVHWSLALLLYLHHAKWSQAAPMAEGGGQNHHEVVKFMDVYQRSYCHPIETLVDIFQEYPDEIEYIFKPSCVPLMRCGGCCNDEGLECVPTEESNITMQIMRIKPHQGQHIGEMSFLQHNKCECRPKKDRARQEKKSVRGKGKGQKRKRKKSRYKSWSVYVGARCCLMPWSLPGPHPCGPCSERRKHLFVQDPQTCKCSCKNTDSRCKARQLELNERTCRCDKPRR

SEQ ID NO: 150 - protein, 215 aa, Homo sapiens
MNFLLSWVHWSLALLLYLHHAKWSQAAPMAEGGGQNHHEVVKFMDVYQRSYCHPIETLVDIFQEYPDEIEYIFKPSCVPLMRCGGCCNDEGLECVPTEESNITMQIMRIKPHQGQHIGEMSFLQHNKCECRPKKDRARQEKKSVRGKGKGQKRKRKKSRYKSWSVPCGPCSERRKHLFVQDPQTCKCSCKNTDSRCKARQLELNERTCRCDKPRR

SEQ ID NO: 151 - protein, 395 aa, Homo sapiens
MTDRQTDTAPSPSYHLLPGRRRTVDAAASRGQGPEPAPGGGVEGVGARGVALKLFVQLLGCSRFGGAVVRAGEAEPSGAARSASSGREEPQPEEGEEEEEKEEERGPQWRLGARKPGSWTGEAAVCADSAPAARAPQALARASGRGGRVARRGAEESGPPHSPSRRGSASRAGPGRASETMNFLLSWVHWSLALLLYLHHAKWSQAAPMAEGGGQNHHEVVKFMDVYQRSYCHPIETLVDIFQEYPDEIEYIFKPSCVPLMRCGGCCNDEGLECVPTEESNITMQIMRIKPHQGQHIGEMSFLQHNKCECRPKKDRARQEKKSVRGKGKGQKRKRKKSRYKSWSVPCGPCSERRKHLFVQDPQTCKCSCKNTDSRCKARQLELNERTCRCDKPRR

SEQ ID NO: 152 - protein, 209 aa, Homo sapiens
MNFLLSWVHWSLALLLYLHHAKWSQAAPMAEGGGQNHHEVVKFMDVYQRSYCHPIETLVDIFQEYPDEIEYIFKPSCVPLMRCGGCCNDEGLECVPTEESNITMQIMRIKPHQGQHIGEMSFLQHNKCECRPKKDRARQEKKSVRGKGKGQKRKRKKSRPCGPCSERRKHLFVQDPQTCKCSCKNTDSRCKARQLELNERTCRCDKPRR

SEQ ID NO: 153 - protein, 389 aa, Homo sapiens
MTDRQTDTAPSPSYHLLPGRRRTVDAAASRGQGPEPAPGGGVEGVGARGVALKLFVQLLGCSRFGGAVVRAGEAEPSGAARSASSGREEPQPEEGEEEEEKEEERGPQWRLGARKPGSWTGEAAVCADSAPAARAPQALARASGRGGRVARRGAEESGPPHSPSRRGSASRAGPGRASETMNFLLSWVHWSLALLLYLHHAKWSQAAPMAEGGGQNHHEVVKFMDVYQRSYCHPIETLVDIFQEYPDEIEYIFKPSCVPLMRCGGCCNDEGLECVPTEESNITMQIMRIKPHQGQHIGEMSFLQHNKCECRPKKDRARQEKKSVRGKGKGQKRKRKKSRPCGPCSERRKHLFVQDPQTCKCSCKNTDSRCKARQLELNERTCRCDKPRR

SEQ ID NO: 154 - protein, 191 aa, Homo sapiens
MNFLLSWVHWSLALLLYLHHAKWSQAAPMAEGGGQNHHEVVKFMDVYQRSYCHPIETLVDIFQEYPDEIEYIFKPSCVPLMRCGGCCNDEGLECVPTEESNITMQIMRIKPHQGQHIGEMSFLQHNKCECRPKKDRARQENPCGPCSERRKHLFVQDPQTCKCSCKNTDSRCKARQLELNERTCRCDKPRR

SEQ ID NO: 155 - protein, 371 aa, Homo sapiens
MTDRQTDTAPSPSYHLLPGRRRTVDAAASRGQGPEPAPGGGVEGVGARGVALKLFVQLLGCSRFGGAVVRAGEAEPSGAARSASSGREEPQPEEGEEEEEKEEERGPQWRLGARKPGSWTGEAAVCADSAPAARAPQALARASGRGGRVARRGAEESGPPHSPSRRGSASRAGPGRASETMNFLLSWVHWSLALLLYLHHAKWSQAAPMAEGGGQNHHEVVKFMDVYQRSYCHPIETLVDIFQEYPDEIEYIFKPSCVPLMRCGGCCNDEGLECVPTEESNITMQIMRIKPHQGQHIGEMSFLQHNKCECRPKKDRARQENPCGPCSERRKHLFVQDPQTCKCSCKNTDSRCKARQLELNERTCRCDKPRR

SEQ ID NO: 156 - protein, 174 aa, Homo sapiens
MNFLLSWVHWSLALLLYLHHAKWSQAAPMAEGGGQNHHEVVKFMDVYQRSYCHPIETLVDIFQEYPDEIEYIFKPSCVPLMRCGGCCNDEGLECVPTEESNITMQIMRIKPHQGQHIGEMSFLQHNKCECRPKKDRARQENPCGPCSERRKHLFVQDPQTCKCSCKNTDSRCKM

SEQ ID NO: 157 - protein, 354 aa, Homo sapiens
MTDRQTDTAPSPSYHLLPGRRRTVDAAASRGQGPEPAPGGGVEGVGARGVALKLFVQLLGCSRFGGAVVRAGEAEPSGAARSASSGREEPQPEEGEEEEEKEEERGPQWRLGARKPGSWTGEAAVCADSAPAARAPQALARASGRGGRVARRGAEESGPPHSPSRRGSASRAGPGRASETMNFLLSWVHWSLALLLYLHHAKWSQAAPMAEGGGQNHHEVVKFMDVYQRSYCHPIETLVDIFQEYPDEIEYIFKPSCVPLMRCGGCCNDEGLECVPTEESNITMQIMRIKPHQGQHIGEMSFLQHNKCECRPKKDRARQENPCGPCSERRKHLFVQDPQTCKCSCKNTDSRCKM

SEQ ID NO: 158 - protein, 147 aa, Homo sapiens
MNFLLSWVHWSLALLLYLHHAKWSQAAPMAEGGGQNHHEVVKFMDVYQRSYCHPIETLVDIFQEYPDEIEYIFKPSCVPLMRCGGCCNDEGLECVPTEESNITMQIMRIKPHQGQHIGEMSFLQHNKCECRPKKDRARQEKCDKPRR

SEQ ID NO: 159 - protein, 327 aa, Homo sapiens
MTDRQTDTAPSPSYHLLPGRRRTVDAAASRGQGPEPAPGGGVEGVGARGVALKLFVQLLGCSRFGGAVVRAGEAEPSGAARSASSGREEPQPEEGEEEEEKEEERGPQWRLGARKPGSWTGEAAVCADSAPAARAPQALARASGRGGRVARRGAEESGPPHSPSRRGSASRAGPGRASETMNFLLSWVHWSLALLLYLHHAKWSQAAPMAEGGGQNHHEVVKFMDVYQRSYCHPIETLVDIFQEYPDEIEYIFKPSCVPLMRCGGCCNDEGLECVPTEESNITMQIMRIKPHQGQHIGEMSFLQHNKCECRPKKDRARQEKCDKPRR

SEQ ID NO: 160 - protein, 191 aa, Homo sapiens
MNFLLSWVHWSLALLLYLHHAKWSQAAPMAEGGGQNHHEVVKFMDVYQRSYCHPIETLVDIFQEYPDEIEYIFKPSCVPLMRCGGCCNDEGLECVPTEESNITMQIMRIKPHQGQHIGEMSFLQHNKCECRPKKDRARQENPCGPCSERRKHLFVQDPQTCKCSCKNTDSRCKARQLELNERTCRSLTRKD

SEQ ID NO: 161 - protein, 371 aa, Homo sapiens
MTDRQTDTAPSPSYHLLPGRRRTVDAAASRGQGPEPAPGGGVEGVGARGVALKLFVQLLGCSRFGGAVVRAGEAEPSGAARSASSGREEPQPEEGEEEEEKEEERGPQWRLGARKPGSWTGEAAVCADSAPAARAPQALARASGRGGRVARRGAEESGPPHSPSRRGSASRAGPGRASETMNFLLSWVHWSLALLLYLHHAKWSQAAPMAEGGGQNHHEVVKFMDVYQRSYCHPIETLVDIFQEYPDEIEYIFKPSCVPLMRCGGCCNDEGLECVPTEESNITMQIMRIKPHQGQHIGEMSFLQHNKCECRPKKDRARQENPCGPCSERRKHLFVQDPQTCKCSCKNTDSRCKARQLELNERTCRSLTRKD

SEQ ID NO: 162 - protein, 137 aa, Homo sapiens
MNFLLSWVHWSLALLLYLHHAKWSQAAPMAEGGGQNHHEVVKFMDVYQRSYCHPIETLVDIFQEYPDEIEYIFKPSCVPLMRCGGCCNDEGLECVPTEESNITMQIMRIKPHQGQHIGEMSFLQHNKCECRCDKPRR

SEQ ID NO: 163 - protein, 317 aa, Homo sapiens
MTDRQTDTAPSPSYHLLPGRRRTVDAAASRGQGPEPAPGGGVEGVGARGVALKLFVQLLGCSRFGGAVVRAGEAEPSGAARSASSGREEPQPEEGEEEEEKEEERGPQWRLGARKPGSWTGEAAVCADSAPAARAPQALARASGRGGRVARRGAEESGPPHSPSRRGSASRAGPGRASETMNFLLSWVHWSLALLLYLHHAKWSQAAPMAEGGGQNHHEVVKFMDVYQRSYCHPIETLVDIFQEYPDEIEYIFKPSCVPLMRCGGCCNDEGLECVPTEESNITMQIMRIKPHQGQHIGEMSFLQHNKCECRCDKPRR

SEQ ID NO: 164 - protein, 351 aa, Homo sapiens
MTDRQTDTAPSPSYHLLPGRRRTVDAAASRGQGPEPAPGGGVEGVGARGVALKLFVQLLGCSRFGGAVVRAGEAEPSGAARSASSGREEPQPEEGEEEEEKEEERGPQWRLGARKPGSWTGEAAVCADSAPAARAPQALARASGRGGRVARRGAEESGPPHSPSRRGSASRAGPGRASETMNFLLSWVHWSLALLLYLHHAKWSQAAPMAEGGGQNHHEVVKFMDVYQRSYCHPIETLVDIFQEYPDEIEYIFKPSCVPLMRCGGCCNDEGLECVPTEESNITMQIMRIKPHQGQHIGEMSFLQHNKCECRPKKDRARQEKKSVRGKGKGQKRKRKKSRYKSWSVCDKPRR

SEQ ID NO: 165 - protein, 351 aa, Homo sapiens; identical to SEQ ID NO: 164

SEQ ID NO: 166 - protein, 171 aa, Homo sapiens
MNFLLSWVHWSLALLLYLHHAKWSQAAPMAEGGGQNHHEVVKFMDVYQRSYCHPIETLVDIFQEYPDEIEYIFKPSCVPLMRCGGCCNDEGLECVPTEESNITMQIMRIKPHQGQHIGEMSFLQHNKCECRPKKDRARQEKKSVRGKGKGQKRKRKKSRYKSWSVCDKPRR

SEQ ID NO: 167 - protein, 188 aa, Homo sapiens
MSPLLRRLLLAALLQLAPAQAPVSQPDAPGHQRKVVSWIDVYTRATCQPREVVVPLTVELMGTVAKQLVPSCVTVQRCGGCCPDDGLECVPTGQHQVRMQILMIRYPSSQLGEMSLEEHSQCECRPKKKDSAVKPDSPRPLCPRCTQHHQRPDPRTCRCRCRRRSFLRCQGRGLELNPDTCRCRKLRR

SEQ ID NO: 168 - protein, 419 aa, Homo sapiens
MHLLGFFSVACSLLAAALLPGPREAPAAAAAFESGLDLSDAEPDAGEATAYASKDLEEQLRSVSSVDELMTVLYPEYWKMYKCQLRKGGWQHNREQANLNSRTEETIKFAAAHYNTEILKSIDNEWRKTQCMPREVCIDVGKEFGVATNTFFKPPCVSVYRCGGCCNSEGLQCMNTSTSYLSKTLFEITVPLSQGPKPVTISFANHTSCRCMSKLDVYRQVHSIIRRSLPATLPQCQAANKTCPTNYMWNNHICRCLAQEDFMFSSDAGDDSTDGFHDICGPNKELDEETCQCVCRAGLRPASCGPHKELDRNSCQCVCKNKLFPSQCGANREFDENTCQCVCKRTCPRNQPLNPGKCACECTESPQKCLLKGKKFHHQTCSCYRRPCTNRQKACEPGFSYSEEVCRCVPSYWKRPQMS

SEQ ID NO: 169 - protein, 207 aa, Homo sapiens
MSPLLRRLLLAALLQLAPAQAPVSQPDAPGHQRKVVSWIDVYTRATCQPREVVVPLTVELMGTVAKQLVPSCVTVQRCGGCCPDDGLECVPTGQHQVRMQILMIRYPSSQLGEMSLEEHSQCECRPKKKDSAVKPDRAATPHHRPQPRSVPGWDSAPGAPSPADITHPTPAPGPSAHAAPSTTSALTPGPAAAAADAAASSVAKGGA

SEQ ID NO: 170 - protein, 739 aa, Homo sapiens
MPGKMVVILGASNILWIMFAASQAFKIETTPESRYLAQIGDSVSLTCSTTGCESPFFSWRTQIDSPLNGKVTNEGTTSTLTMNPVSFGNEHSYLCTATCESRKLEKGIQVEIYSFPKDPEIHLSGPLEAGKPITVKCSVADVYPFDRLEIDLLKGDHLMKSQEFLEDADRKSLETKSLEVTFTPVIEDIGKVLVCRAKLHIDEMDSVPTVRQAVKELQVYISPKNTVISVNPSTKLQEGGSVTMTCSSEGLPAPEIFWSKKLDNGNLQHLSGNATLTLIAMRMEDSGIYVCEGVNLIGKNRKEVELIVQEKPFTVEISPGPRIAAQIGDSVMLTCSVMGCESPSFSWRTQIDSPLSGKVRSEGTNSTLTLSPVSFENEHSYLCTVTCGHKKLEKGIQVELYSFPRDPEIEMSGGLVNGSSVTVSCKVPSVYPLDRLEIELLKGETILENIEFLEDTDMKSLENKSLEMTFIPTIEDTGKALVCQAKLHIDDMEFEPKQRQSTQTLYVNVAPRDTTVLVSPSSILEEGSSVNMTCLSQGFPAPKILWSRQLPNGELQPLSENATLTLISTKMEDSGVYLCEGINQAGRSRKEVELIIQVTPKDIKLTAFPSESVKEGDTVIISCTCGNVPETWIILKKKAETGDTVLKSIDGAYTIRKAQLKDAGVYECESKNKVGSQLRSLTLDVQGRENNKDYFSPELLVLYFASSLIIPAIGMIIYFARKANMKGSYSLVEAQKSKV

SEQ ID NO: 171 - protein, 647 aa, Homo sapiens
MPGKMVVILGASNILWIMFAASQAFKIETTPESRYLAQIGDSVSLTCSTTGCESPFFSWRTQIDSPLNGKVTNEGTTSTLTMNPVSFGNEHSYLCTATCESRKLEKGIQVEIYSFPKDPEIHLSGPLEAGKPITVKCSVADVYPFDRLEIDLLKGDHLMKSQEFLEDADRKSLETKSLEVTFTPVIEDIGKVLVCRAKLHIDEMDSVPTVRQAVKELQVYISPKNTVISVNPSTKLQEGGSVTMTCSSEGLPAPEIFWSKKLDNGNLQHLSGNATLTLIAMRMEDSGIYVCEGVNLIGKNRKEVELIVQAFPRDPEIEMSGGLVNGSSVTVSCKVPSVYPLDRLEIELLKGETILENIEFLEDTDMKSLENKSLEMTFIPTIEDTGKALVCQAKLHIDDMEFEPKQRQSTQTLYVNVAPRDTTVLVSPSSILEEGSSVNMTCLSQGFPAPKILWSRQLPNGELQPLSENATLTLISTKMEDSGVYLCEGINQAGRSRKEVELIIQVTPKDIKLTAFPSESVKEGDTVIISCTCGNVPETWIILKKKAETGDTVLKSIDGAYTIRKAQLKDAGVYECESKNKVGSQLRSLTLDVQGRENNKDYFSPELLVLYFASSLIIPAIGMIIYFARKANMKGSYSLVEAQKSKV

SEQ ID NO: 172 - protein, 677 aa, Homo sapiens
MPGKMVVILGASNILWIMFAASQAFKIETTPESRYLAQIGDSVSLTCSTTGSFPKDPEIHLSGPLEAGKPITVKCSVADVYPFDRLEIDLLKGDHLMKSQEFLEDADRKSLETKSLEVTFTPVIEDIGKVLVCRAKLHIDEMDSVPTVRQAVKELQVYISPKNTVISVNPSTKLQEGGSVTMTCSSEGLPAPEIFWSKKLDNGNLQHLSGNATLTLIAMRMEDSGIYVCEGVNLIGKNRKEVELIVQEKPFTVEISPGPRIAAQIGDSVMLTCSVMGCESPSFSWRTQIDSPLSGKVRSEGTNSTLTLSPVSFENEHSYLCTVTCGHKKLEKGIQVELYSFPRDPEIEMSGGLVNGSSVTVSCKVPSVYPLDRLEIELLKGETILENIEFLEDTDMKSLENKSLEMTFIPTIEDTGKALVCQAKLHIDDMEFEPKQRQSTQTLYVNVAPRDTTVLVSPSSILEEGSSVNMTCLSQGFPAPKILWSRQLPNGELQPLSENATLTLISTKMEDSGVYLCEGINQAGRSRKEVELIIQVTPKDIKLTAFPSESVKEGDTVIISCTCGNVPETWIILKKKAETGDTVLKSIDGAYTIRKAQLKDAGVYECESKNKVGSQLRSLTLDVQGRENNKDYFSPELLVLYFASSLIIPAIGMIIYFARKANMKGSYSLVEAQKSKV

SEQ ID NO: 173 - protein, 266 aa, Homo sapiens
MVCLKLPGGSCMTALTVTLMVLSSPLALSGDTRPRFLWQPKRECHFFNGTERVRFLDRYFYNQEESVRFDSDVGEFRAVTELGRPDAEYWNSQKDILEQARAAVDTYCRHNYGVVESFTVQRRVQPKVTVYPSKTQPLQHHNLLVCSVSGFYPGSIEVRWFLNGQEEKAGMVSTGLIQNGDWTFQTLVMLETVPRSGEVYTCQVEHPSVTSPLTVEWRARSESAQSKMLSGVGGFVLGLLFLGAGLFIYFRNQKGHSGLQPTGFLS

SEQ ID NO: 174 - protein, 366 aa, Homo sapiens
MRVMAPRALLLLLSGGLALTETWACSHSMRYFDTAVSRPGRGEPRFISVGYVDDTQFVRFDSDAASPRGEPRAPWVEQEGPEYWDRETQKYKRQAQADRVSLRNLRGYYNQSEDGSHTLQRMSGCDLGPDGRLLRGYDQSAYDGKDYIALNEDLRSWTAADTAAQITQRKLEAARAAEQLRAYLEGTCVEWLRRYLENGKETLQRAEPPKTHVTHHPLSDHEATLRCWALGFYPAEITLTWQRDGEDQTQDTELVETRPAGDGTFQKWAAVVVPSGQEQRYTCHMQHEGLQEPLTLSWEPSSQPTIPIMGIVAGLAVLVVLAVLGAVVTAMMCRRKSSGGKGGSCSQAACSNSAQGSDESLITCKA

SEQ ID NO: 175 - protein, 365 aa, Homo sapiens
MAVMAPRTLLLLLSGALALTQTWAGSHSMRYFFTSVSRPGRGEPRFIAVGYVDDTQFVRFDSDAASQRMEPRAPWIEQEGPEYWDQETRNVKAQSQTDRVDLGTLRGYYNQSEAGSHTIQIMYGCDVGSDGRFLRGYRQDAYDGKDYIALNEDLRSWTAADMAAQITKRKWEAAHEAEQLRAYLDGTCVEWLRRYLENGKETLQRTDPPKTHMTHHPISDHEATLRCWALGFYPAEITLTWQRDGEDQTQDTELVETRPAGDGTFQKWAAVVVPSGEEQRYTCHVQHEGLPKPLTLRWELSSQPTIPIVGIIAGLVLLGAVITGAVVAAVMWRRKSSDRKGGSYTQAASSDSAQGSDVSLTACKV

SEQ ID NO: 176 - protein, 362 aa, Homo sapiens
MLVMAPRTVLLLLSAALALTETWAGSHSMRYFYTSVSRPGRGEPRFISVGYVDDTQFVRFDSDAASPREEPRAPWIEQEGPEYWDRNTQIYKAQAQTDRESLRNLRGYYNQSEAGSHTLQSMYGCDVGPDGRLLRGHDQYAYDGKDYIALNEDLRSWTAADTAAQITQRKWEAAREAEQRRAYLEGECVEWLRRYLENGKDKLERADPPKTHVTHHPISDHEATLRCWALGFYPAEITLTWQRDGEDQTQDTELVETRPAGDRTFQKWAAVVVPSGEEQRYTCHVQHEGLPKPLTLRWEPSSQSTVPIVGIVAGLAVLAVVVIGAVVAAVMCRRKSSGGKGGSYSQAACSDSAQGSDVSLTA

SEQ ID NO: 177 - protein, 266 aa, Homo sapiens
MVCLRLPGGSCMAVLTVTLMVLSSPLALAGDTRPRFLEYSTSECHFFNGTERVRYLDRYFHNQEENVRFDSDVGEFRAVTELGRPDAEYWNSQKDLLEQKRGRVDNYCRHNYGVVESFTVQRRVHPKVTVYPSKTQPLQHHNLLVCSVSGFYPGSIEVRWFRNGQEEKTGVVSTGLIHNGDWTFQTLVMLETVPRSGEVYTCQVEHPSVTSPLTVEWRARSESAQSKMLSGVGGFVLGLLFLGAGLFIYFRNQKGHSGLQPRGFLS

SEQ ID NO: 178 - protein, 366 aa, Homo sapiens
MRVMAPRALLLLLSGGLALTETWACSHSMRYFDTAVSRPGRGEPRFISVGYVDDTQFVRFDSDAASPRGEPRAPWVEQEGPEYWDRETQNYKRQAQADRVSLRNLRGYYNQSEDGSHTLQRMYGCDLGPDGRLLRGYDQSAYDGKDYIALNEDLRSWTAADTAAQITQRKLEAARAAEQLRAYLEGTCVEWLRRYLENGKETLQRAEPPKTHVTHHPLSDHEATLRCWALGFYPAEITLTWQRDGEDQTQDTELVETRPAGDGTFQKWAAVVVPSGQEQRYTCHMQHEGLQEPLTLSWEPSSQPTIPIMGIVAGLAVLVVLAVLGAVVTAMMCRRKSSGGKGGSCSQAACSNSAQGSDESLITCKA

SEQ ID NO: 179 - protein, 365 aa, Homo sapiens
MAVMAPRTLLLLLSGALALTQTWAGSHSMRYFFTSVSRPGRGEPRFIAVGYVDDTQFVRFDSDAASQKMEPRAPWIEQEGPEYWDQETRNMKAHSQTDRANLGTLRGYYNQSEDGSHTIQIMYGCDVGPDGRFLRGYRQDAYDGKDYIALNEDLRSWTAADMAAQITKRKWEAVHAAEQRRVYLEGRCVDGLRRYLENGKETLQRTDPPKTHMTHHPISDHEATLRCWALGFYPAEITLTWQRDGEDQTQDTELVETRPAGDGTFQKWAAVVVPSGEEQRYTCHVQHEGLPKPLTLRWELSSQPTIPIVGIIAGLVLLGAVITGAVVAAVMWRRKSSDRKGGSYTQAASSDSAQGSDVSLTACKV

SEQ ID NO: 180 - protein, 358 aa, Homo sapiens
MVDGTLLLLLSEALALTQTWAGSHSLKYFHTSVSRPGRGEPRFISVGYVDDTQFVRFDNDAASPRMVPRAPWMEQEGSEYWDRETRSARDTAQIFRVNLRTLRGYYNQSEAGSHTLQWMHGCELGPDGRFLRGYEQFAYDGKDYLTLNEDLRSWTAVDTAAQISEQKSNDASEAEHQRAYLEDTCVEWLHKYLEKGKETLLHLEPPKTHVTHHPISDHEATLRCWALGFYPAEITLTWQQDGEGHTQDTELVETRPAGDGTFQKWAAVVVPSGEEQRYTCHVQHEGLPEPVTLRWKPASQPTIPIVGIIAGLVLLGSVVSGAVVAAVIWRKKSSGGKGGSYSKAEWSDSAQGSESHSL

SEQ ID NO: 181 - protein, 266 aa, Homo sapiens
MVCLKLPGGSYMAKLTVTLMVLSSPLALAGDTRPRFLQQDKYECHFFNGTERVRFLHRDIYNQEEDLRFDSDVGEYRAVTELGRPDAEYWNSQKDFLEDRRAAVDTYCRHNYGVGESFTVQRRVEPKVTVYPARTQTLQHHNLLVCSVNGFYPGSIEVRWFRNSQEEKAGVVSTGLIQNGDWTFQTLVMLETVPRSGEVYTCQVEHPSVTSPLTVEWRAQSESAQSKMLSGVGGFVLGLLFLGAGLFIYFKNQKGHSGLHPTGLVS

SEQ ID NO: 182 - protein, 255 aa, Homo sapiens
MILNKALLLGALALTAVMSPCGGEDIVADHVASYGVNFYQSHGPSGQYTHEFDGDEEFYVDLETKETVWQLPMFSKFISFDPQSALRNMAVGKHTLEFMMRQSNSTAATNEVPEVTVFSKFPVTLGQPNTLICLVDNIFPPVVNITWLSNGHSVTEGVSETSFLSKSDHSFFKISYLTFLPSADEIYDCKVEHWGLDEPLLKHWEPEIPAPMSELTETLVCALGLSVGLMGIVVGTVFIIQGLRSVGASRHQGLL

SEQ ID NO: 183 - protein, 266 aa, Homo sapiens
MVCLKLPGGSSLAALTVTLMVLSSRLAFAGDTRPRFLELRKSECHFFNGTERVRYLDRYFHNQEEFLRFDSDVGEYRAVTELGRPVAESWNSQKDLLEQKRGRVDNYCRHNYGVGESFTVQRRVHPQVTVYPAKTQPLQHHNLLVCSVSGFYPGSIEVRWFRNGQEEKAGVVSTGLIQNGDWTFQTLVMLETVPRSGEVYTCQVEHPSVTSALTVEWRARSESAQSKMLSGVGGFVLGLLFLGAGLFIYFRNQKGHSGLQPTGFLS

SEQ ID NO: 184 - protein, 260 aa, Homo sapiens
MRPEDRMFHIRAVILRALSLAFLLSLRGAGAIKADHVSTYAAFVQTHRPTGEFMFEFDEDEMFYVDLDKKETVWHLEEFGQAFSFEAQGGLANIAILNNNLNTLIQRSNHTQATNDPPEVTVFPKEPVELGQPNTLICHIDKFFPPVLNVTWLCNGELVTEGVAESLFLPRTDYSFHKFHYLTFVPSAEDFYDCRVEHWGLDQPLLKHWEAQEPIQMPETTETVLCALGLVLGLVGIIVGTVLIIKSLRSGHDPRAQGTL

SEQ ID NO: 185 - protein, 260 aa, Homo sapiens; identical to SEQ ID NO: 184

SEQ ID NO: 186 - protein, 296 aa, Homo sapiens
MHRRRSRSCREDQKPVMDDQRDLISNNEQLPMLGRRPGAPESKCSRGALYTGFSILVTLLLAGQATTAYFLYQQQGRLDKLTVTSQNLQLENLRMKLPKPPKPVSKMRMATPLLMQALPMGALPQGPMQNATKYGNMTEDHVMHLLQNADPLKVYPPLKGSFPENLRHLKNTMETIDWKVFESWMHHWLLFEMSRHSLEQKPTDAPPKVLTKCQEEVSHIPAVHPGSFRPKCDENGNYLPLQCYGSIGYCWCVFPNGTEVPNTRSRGHHNCSESLELEDPSSGLGVTKQDLGPVPM

SEQ ID NO: 187 - protein, 258 aa, Homo sapiens
MMVLQVSAAPRTVALTALLMVLLTSVVQGRATPENYLFQGRQECYAFNGTQRFLERYIYNREEFARFDSDVGEFRAVTELGRPAAEYWNSQKDILEEKRAVPDRMCRHNYELGGPMTLQRRVQPRVNVSPSKKGPLQHHNLLVCHVTDFYPGSIQVRWFLNGQEETAGVVSTNLIRNGDWTFQILVMLEMTPQQGDVYTCQVEHTSLDSPVTVEWKAQSDSARSKTLTGAGGFVLGLIICGVGIFMHRRSKKVQRGSA

SEQ ID NO: 188 - protein, 254 aa, Homo sapiens
MAISGVPVLGFFIIAVLMSAQESWAIKEEHVIIQAEFYLNPDQSGEFMFDFDGDEIFHVDMAKKETVWRLEEFGRFASFEAQGALANIAVDKANLEIMTKRSNYTPITNVPPEVTVLTNSPVELREPNVLICFIDKFTPPVVNVTWLRNGKPVTTGVSETVFLPREDHLFRKFHYLPFLPSTEDVYDCRVEHWGLDEPLLKHWEFDAPSPLPETTENVVCALGLTVGLVGIIIGTIFIIKGLRKSNAAERRGPL

SEQ ID NO: 189 - protein, 250 aa, Homo sapiens
MALRAGLVLGFHTLMTLLSPQEAGATKADHMGSYGPAFYQSYGASGQFTHEFDEEQLFSVDLKKSEAVWRLPEFGDFARFDPQGGLAGIAAIKAHLDILVERSNRSRAINVPPRVTVLPKSRVELGQPNILICIVDNIFPPVINITWLRNGQTVTEGVAQTSFYSQPDHLFRKFHYLPFVPSAEDVYDCQVEHWGLDAPLLRHWELQVPIPPPDAMETLVCALGLAIGLVGFLVGTVLIIMGTYVSSVPR

SEQ ID NO: 190 - protein, 227 aa, Homo sapiens
MALQIPGGFWAAAVTVMLVMLSTPVAEARDFPKDFLVQFKGMCYFTNGTERVRGVARYIYNREEYGRFDSDVGEFQAVTELGRSIEDWNNYKDFLEQERAAVDKVCRHNYEAELRTTLQRQVEPTVTISPSRTEALNHHNLLVCSVTDFYPAQIKVRWFRNDQEETAGVVSTSLIRNGDWTFQILVMLEITPQRGDIYTCQVEHPSLQSPITVEWRPRGPPPAGLLH

SEQ ID NO: 191 - protein, 249 aa, Homo sapiens
MGELMAFLLPLIIVLMVKHSDSRTHSLRYFRLGVSDPIHGVPEFISVGYVDSHPITTYDSVTRQKEPRAPWMAENLAPDHWERYTQLLRGWQQMFKVELKRLQRHYNHSGSHTYQRMIGCELLEDGSTTGFLQYAYDGQDFLIFNKDTLSWLAVDNVAHTIKQAWEANQHELLYQKNWLEEECIAWLKRFLEYGKDTLQRTESETIPLVMKAVSGSIVLVIVLAGVGVLVWRRRPREQNGAIYLPTPDR

SEQ ID NO: 192 - protein, 296 aa, Homo sapiens
MGELMAFLLPLIIVLMVKHSDSRTHSLRYFRLGVSDPIHGVPEFISVGYVDSHPITTYDSVTRQKEPRAPWMAENLAPDHWERYTQLLRGWQQMFKVELKRLQRHYNHSDNVAHTIKQAWEANQHELLYQKNWLEEECIAWLKRFLEYGKDTLQRTEPPLVRVNRKETFPGVTALFCKAHGFYPPEIYMTWMKNGEEIVQEIDYGDILPSGDGTYQAWASIELDPQSSNLYSCHVEHCGVHMVLQVPQESETIPLVMKAVSGSIVLVIVLAGVGVLVWRRRPREQNGAIYLPTPDR

SEQ ID NO: 193 - protein, 263 aa, Homo sapiens
MITFLPLLLGLSLGCTGAGGFVAHVESTCLLDDAGTPKDFTYCISFNKDLLTCWDPEENKMAPCEFGVLNSLANVLSQHLNQKDTLMQRLRNGLQNCATHTQPFWGSLTNRTRPPSVQVAKTTPFNTREPVMLACYVWGFYPAEVTITWRKNGKLVMPHSSAHKTAQPNGDWTYQTLSHLALTPSYGDTYTCVVEHTGAPEPILRDWTPGLSPMQTLKVSVSAVTLGLGLIIFSLGVISWRRAGHSSYTPLPGSNYSEGWHIS

SEQ ID NO: 194 - protein, 214 aa, Homo sapiens
MGELMAFLLPLIIVLMVKHSDSRTHSLRYFRLGVSDPIHGVPEFISVGYVDSHPITTYDSVTRQKEPRAPWMAENLAPDHWERYTQLLRGWQQMFKVELKRLQRHYNHSGSHTYQRMIGCELLEDGSTTGFLQYAYDGQDFLIFNKDTLSWLAVDNVAHTIKQAWEANQHELLYQKNWLEEECIAWLKRFLEYGKDTLQRTEQNGAIYLPTPDR

SEQ ID NO: 195 - protein, 341 aa, Homo sapiens
MGELMAFLLPLIIVLMVKHSDSRTHSLRYFRLGVSDPIHGVPEFISVGYVDSHPITTYDSVTRQKEPRAPWMAENLAPDHWERYTQLLRGWQQMFKVELKRLQRHYNHSGSHTYQRMIGCELLEDGSTTGFLQYAYDGQDFLIFNKDTLSWLAVDNVAHTIKQAWEANQHELLYQKNWLEEECIAWLKRFLEYGKDTLQRTEPPLVRVNRKETFPGVTALFCKAHGFYPPEIYMTWMKNGEEIVQEIDYGDILPSGDGTYQAWASIELDPQSSNLYSCHVEHCGVHMVLQVPQESETIPLVMKAVSGSIVLVIVLAGVGVLVWRRRPREQNGAIYLPTPDR

SEQ ID NO: 196 - protein, 266 aa, Homo sapiens
MVCLKLPGGSCMAALTVTLTVLSSPLALAGDTQPRFLEQAKCECHFLNGTERVWNLIRYIYNQEEYARYNSDLGEYQAVTELGRPDAEYWNSQKDLLERRRAEVDTYCRYNYGVVESFTVQRRVQPKVTVYPSKTQPLQHHNLLVCSVNGFYPGSIEVRWFRNGQEEKAGVVSTGLIQNGDWTFQTLVMLETVPRSGEVYTCQVEHPSMMSPLTVQWSARSESAQSKMLSGVGGFVLGLLFLGTGLFIYFRNQKGHSGLQPTGLLS

SEQ ID NO: 197 - protein, 255 aa, Homo sapiens
MILNKALLLGALALTTVMSPCGGEDIVADHVASCGVNLYQFYGPSGQYTHEFDGDEQFYVDLERKETAWRWPEFSKFGGFDPQGALRNMAVAKHNLNIMIKRYNSTAATNEVPEVTVFSKSPVTLGQPNTLICLVDNIFPPVVNITWLSNGQSVTEGVSETSFLSKSDHSFFKISYLTFLPSADEIYDCKVEHWGLDQPLLKHWEPEIPAPMSELTETVVCALGLSVGLMGIVVGTVFIIQGLRSVGASRHQGPL

SEQ ID NO: 198 - protein, 261 aa, Homo sapiens
MSWKKALRIPGDLRVATVTLMLAMLSSLLAEGRDSPEDFVFQFKGMCYFTNGTERVRLVTRYIYNREEYARFDSDVGVYRAVTPQGRPDAEYWNSQKEVLEGTRAELDTVCRHNYEVAFRGILQRRVEPTVTISPSRTEALNHHNLLVCSVTDFYPGQIKVRWFRNDQEETAGVVSTPLIRNGDWTFQILVMLEMTPQRGDVYTCHVEHPSLQSPITVEWRAQSESAQSKMLSGVGGFVLGLIFLGLGLIIRQRSQKGLLH

SEQ ID NO: 199 - protein, 269 aa, Homo sapiens
MSWKKALRIPGDLRVATVTLMLAMLSSLLAEGRDSPEDFVFQFKGMCYFTNGTERVRLVTRYIYNREEYARFDSDVGVYRAVTPQGRPDAEYWNSQKEVLEGTRAELDTVCRHNYEVAFRGILQRRVEPTVTISPSRTEALNHHNLLVCSVTDFYPGQIKVRWFRNDQEETAGVVSTPLIRNGDWTFQILVMLEMTPQRGDVYTCHVEHPSLQSPITVEWRAQSESAQSKMLSGVGGFVLGLIFLGLGLIIRQRSQKGPQGPPPAGLLH

SEQ ID NO: 200 - protein, 261 aa, Homo sapiens
MSWKKALRIPGGLRAATVTLMLSMLSTPVAEGRDSPEDFVYQFKGMCYFTNGTERVRLVSRSIYNREEIVRFDSDVGEFRAVTLLGLPAAEYWNSQKDILERKRAAVDRVCRHNYQLELRTTLQRRVEPTVTISPSRTEALNHHNLLVCSVTDFYPAQIKVRWFRNDQEETAGVVSTPLIRNGDWTFQILVMLEMTPQRGDVYTCHVEHPSLQSPITVEWRAQSESAQSKMLSGIGGFVLGLIFLGLGLIIHHRSQKGLLH

SEQ ID NO: 201 - protein, 273 aa, Homo sapiens
MGSGWVPWVVALLVNLTRLDSSMTQGTDSPEDFVIQAKADCYFTNGTEKVQFVVRFIFNLEEYVRFDSDVGMFVALTKLGQPDAEQWNSRLDLLERSRQAVDGVCRHNYRLGAPFTVGRKVQPEVTVYPERTPLLHQHNLLHCSVTGFYPGDIKIKWFLNGQEERAGVMSTGPIRNGDWTFQTVVMLEMTPELGHVYTCLVDHSSLLSPVSVEWRAQSEYSWRKMLSGIAAFLLGLIFLLVGIVIQLRAQKGYVRTQMSGNEVSRAVLLPQSC

SEQ ID NO: 202 - protein, 260 aa, Homo sapiens; identical to SEQ ID NO: 184

SEQ ID NO: 203 - protein, 261 aa, Homo sapiens
MGHEQNQGAALLQMLPLLWLLPHSWAVPEAPTPMWPDDLQNHTFLHTVYCQDGSPSVGLSEAYDEDQLFFFDFSQNTRVPRLPEFADWAQEQGDAPAILFDKEFCEWMIQQIGPKLDGKIPVSRGFPIAEVFTLKPLEFGKPNTLVCFVSNLFPPMLTVNWQHHSVPVEGFGPTFVSAVDGLSFQAFSYLNFTPEPSDIFSCIVTHEIDRYTAIAYWVPRNALPSDLLENVLCGVAFGLGVLGIIVGIVLIIYFRKPCSGD

SEQ ID NO: 204 - protein, 346 aa, Homo sapiens
MAPRSLLLLLSGALALTDTWAGSHSLRYFSTAVSRPGRGEPRYIAVEYVDDTQFLRFDSDAAIPRMEPREPWVEQEGPQYWEWTTGYAKANAQTDRVALRNLLRRYNQSEAGSHTLQGMNGCDMGPDGRLLRGYHQHAYDGKDYISLNEDLRSWTAADTVAQITQRFYEAEEYAEEFRTYLEGECLELLRRYLENGKETLQRADPPKAHVAHHPISDHEATLRCWALGFYPAEITLTWQRDGEEQTQDTELVETRPAGDGTFQKWAAVVVPPGEEQRYTCHVQHEGLPQPLILRWEQSPQPTIPIVGIVAGLVVLGAVVTGAVVAAVMWRKKSSDRNRGSYSQAAV

SEQ ID NO: 205 - protein, 442 aa, Homo sapiens
MAPRSLLLLLSGALALTDTWAGSHSLRYFSTAVSRPGRGEPRYIAVEYVDDTQFLRFDSDAAIPRMEPREPWVEQEGPQYWEWTTGYAKANAQTDRVALRNLLRRYNQSEAGSHTLQGMNGCDMGPDGRLLRGYHQHAYDGKDYISLNEDLRSWTAADTVAQITQRFYEAEEYAEEFRTYLEGECLELLRRYLENGKETLQRADPPKAHVAHHPISDHEATLRCWALGFYPAEITLTWQRDGEEQTQDTELVETRPAGDGTFQKWAAVVVPPGEEQRYTCHVQHEGLPQPLILRWEQSPQPTIPIVGIVAGLVVLGAVVTGAVVAAVMWRKKSSDRNRGSYSQAAAYSVVSGNLMITWWSSLFLLGVLFQGYLGCLRSHSVLGRRKVGDMWILFFLWLWTSFNTAFLALQSLRFGFGFRRGRSFLLRSWHHLMKRVQIKIFD

SEQ ID NO: 206 - protein, 254 aa, Homo sapiens
MAPRSLLLLLSGALALTDTWAGSHSLRYFSTAVSRPGRGEPRYIAVEYVDDTQFLRFDSDAAIPRMEPREPWVEQEGPQYWEWTTGYAKANAQTDRVALRNLLRRYNQSEAGSHTLQGMNGCDMGPDGRLLRGYHQHAYDGKDYISLNEDLRSWTAADTVAQITQRFYEAEEYAEEFRTYLEGECLELLRRYLENGKETLQRAEQSPQPTIPIVGIVAGLVVLGAVVTGAVVAAVMWRKKSSDRNRGSYSQAAV

SEQ ID NO: 207 - protein, 338 aa, Homo sapiens
MVVMAPRTLFLLLSGALTLTETWAGSHSMRYFSAAVSRPGRGEPRFIAMGYVDDTQFVRFDSDSACPRMEPRAPWVEQEGPEYWEEETRNTKAHAQTDRMNLQTLRGYYNQSEASSHTLQWMIGCDLGSDGRLLRGYEQYAYDGKDYLALNEDLRSWTAADTAAQISKRKCEAANVAEQRRAYLEGTCVEWLHRYLENGKEMLQRADPPKTHVTHHPVFDYEATLRCWALGFYPAEIILTWQRDGEDQTQDVELVETRPAGDGTFQKWAAVVVPSGEEQRYTCHVQHEGLPEPLMLRWKQSSLPTIPIMGIVAGLVVLAAVVTGAAVAAVLWRKKSSD

SEQ ID NO: 208 - protein, 205 aa, Homo sapiens
MTERRVPFSLLRGPSWDPFRDWYPHSRLFDQAFGLPRLPEEWSQWLGGSSWPGYVRPLPPAAIESPAVAAPAYSRALSRQLSSGVSEIRHTADRWRVSLDVNHFAPDELTVKTKDGVVEITGKHEERQDEHGYISRCFTRKYTLPPGVDPTQVSSSLSPEGTLTVEAPMPKLATQSNEITIPVTFESRAQLGGPEAAKSDETAAK

SEQ ID NO: 209 - protein, 732 aa, Homo sapiens
MPEETQTQDQPMEEEEVETFAFQAEIAQLMSLIINTFYSNKEIFLRELISNSSDALDKIRYESLTDPSKLDSGKELHINLIPNKQDRTLTIVDTGIGMTKADLINNLGTIAKSGTKAFMEALQAGADISMIGQFGVGFYSAYLVAEKVTVITKHNDDEQYAWESSAGGSFTVRTDTGEPMGRGTKVILHLKEDQTEYLEERRIKEIVKKHSQFIGYPITLFVEKERDKEVSDDEAEEKEDKEEEKEKEEKESEDKPEIEDVGSDEEEEKKDGDKKKKKKIKEKYIDQEELNKTKPIWTRNPDDITNEEYGEFYKSLTNDWEDHLAVKHFSVEGQLEFRALLFVPRRAPFDLFENRKKKNNIKLYVRRVFIMDNCEELIPEYLNFIRGVVDSEDLPLNISREMLQQSKILKVIRKNLVKKCLELFTELAEDKENYKKFYEQFSKNIKLGIHEDSQNRKKLSELLRYYTSASGDEMVSLKDYCTRMKENQKHIYYITGETKDQVANSAFVERLRKHGLEVIYMIEPIDEYCVQQLKEFEGKTLVSVTKEGLELPEDEEEKKKQEEKKTKFENLCKIMKDILEKKVEKVVVSNRLVTSPCCIVTSTYGWTANMERIMKAQALRDNSTMGYMAAKKHLEINPDHSIIETLRQKAEADKNDKSVKDLVILLYETALLSSGFSLEDPQTHANRIYRMIKLGLGIDEDDPTADDTSAAVTEEMPPLEGDDDTSRMEEVD

SEQ ID NO: 210 - protein, 160 aa, Homo sapiens
MEIPVPVQPSWLRRASAPLPGLSAPGRLFDQRFGEGLLEAELAALCPTTLAPYYLRAPSVALPVAQVPTDPGHFSVLLDVKHFSPEEIAVKVVGEHVEVHARHEERPDEHGFVAREFHRRYRLPPGVDPAAVTSALSPEGVLSIQAAPASAQAPPPAAAK

SEQ ID NO: 211 - protein, 854 aa, Homo sapiens
MPPCSGGDGSTPPGPSLRDRDCPAQSAEYPRDRLDPRPGSPSEASSPPFLRSRAPVNWYQEKAQVFLWHLMVSGSTTLLCLWKQPFHVSAFPVTASLAFRQSQGAGQHLYKDLQPFILLRLLMPEETQTQDQPMEEEEVETFAFQAEIAQLMSLIINTFYSNKEIFLRELISNSSDALDKIRYESLTDPSKLDSGKELHINLIPNKQDRTLTIVDTGIGMTKADLINNLGTIAKSGTKAFMEALQAGADISMIGQFGVGFYSAYLVAEKVTVITKHNDDEQYAWESSAGGSFTVRTDTGEPMGRGTKVILHLKEDQTEYLEERRIKEIVKKHSQFIGYPITLFVEKERDKEVSDDEAEEKEDKEEEKEKEEKESEDKPEIEDVGSDEEEEKKDGDKKKKKKIKEKYIDQEELNKTKPIWTRNPDDITNEEYGEFYKSLTNDWEDHLAVKHFSVEGQLEFRALLFVPRRAPFDLFENRKKKNNIKLYVRRVFIMDNCEELIPEYLNFIRGVVDSEDLPLNISREMLQQSKILKVIRKNLVKKCLELFTELAEDKENYKKFYEQFSKNIKLGIHEDSQNRKKLSELLRYYTSASGDEMVSLKDYCTRMKENQKHIYYITGETKDQVANSAFVERLRKHGLEVIYMIEPIDEYCVQQLKEFEGKTLVSVTKEGLELPEDEEEKKKQEEKKTKFENLCKIMKDILEKKVEKVVVSNRLVTSPCCIVTSTYGWTANMERIMKAQALRDNSTMGYMAAKKHLEINPDHSIIETLRQKAEADKNDKSVKDLVILLYETALLSSGFSLEDPQTHANRIYRMIKLGLGIDEDDPTADDTSAAVTEEMPPLEGDDDTSRMEEVD

SEQ ID NO: 212 - protein, 724 aa, Homo sapiens
MPEEVHHGEEEVETFAFQAEIAQLMSLIINTFYSNKEIFLRELISNASDALDKIRYESLTDPSKLDSGKELKIDIIPNPQERTLTLVDTGIGMTKADLINNLGTIAKSGTKAFMEALQAGADISMIGQFGVGFYSAYLVAEKVVVITKHNDDEQYAWESSAGGSFTVRADHGEPIGRGTKVILHLKEDQTEYLEERRVKEVVKKHSQFIGYPITLYLEKEREKEISDDEAEEEKGEKEEEDKDDEEKPKIEDVGSDEEDDSGKDKKKKTKKIKEKYIDQEELNKTKPIWTRNPDDITQEEYGEFYKSLTNDWEDHLAVKHFSVEGQLEFRALLFIPRRAPFDLFENKKKKNNIKLYVRRVFIMDSCDELIPEYLNFIRGVVDSEDLPLNISREMLQQSKILKVIRKNIVKKCLELFSELAEDKENYKKFYEAFSKNLKLGIHEDSTNRRRLSELLRYHTSQSGDEMTSLSEYVSRMKETQKSIYYITGESKEQVANSAFVERVRKRGFEVVYMTEPIDEYCVQQLKEFDGKSLVSVTKEGLELPEDEEEKKKMEESKAKFENLCKLMKEILDKKVEKVTISNRLVSSPCCIVTSTYGWTANMERIMKAQALRDNSTMGYMMAKKHLEINPDHPIVETLRQKAEADKNDKAVKDLVVLLFETALLSSGFSLEDPQTHSNRIYRMIKLGLGIDEDEVAAEEPNAAVPDEIPPLEGDEDASRMEEVD

SEQ ID NO: 213 - protein, 102 aa, Homo sapiens
MAGQAFRKFLPLFDRVLVERSAAETVTKGGIMLPEKSQGKVLQATVVAVGSGSKGKGGEIQPVSVKVGDKVLLPEYGGTKVVLDDKDYFLFRDGDILGKYVD

SEQ ID NO: 214 - protein, 641 aa, Homo sapiens
MAKAAAIGIDLGTTYSCVGVFQHGKVEIIANDQGNRTTPSYVAFTDTERLIGDAAKNQVALNPQNTVFDAKRLIGRKFGDPVVQSDMKHWPFQVINDGDKPKVQVSYKGETKAFYPEEISSMVLTKMKEIAEAYLGYPVTNAVITVPAYFNDSQRQATKDAGVIAGLNVLRIINEPTAAAIAYGLDRTGKGERNVLIFDLGGGTFDVSILTIDDGIFEVKATAGDTHLGGEDFDNRLVNHFVEEFKRKHKKDISQNKRAVRRLRTACERAKRTLSSSTQASLEIDSLFEGIDFYTSITRARFEELCSDLFRSTLEPVEKALRDAKLDKAQIHDLVLVGGSTRIPKVQKLLQDFFNGRDLNKSINPDEAVAYGAAVQAAILMGDKSENVQDLLLLDVAPLSLGLETAGGVMTALIKRNSTIPTKQTQIFTTYSDNQPGVLIQVYEGERAMTKDNNLLGRFELSGIPPAPRGVPQIEVTFDIDANGILNVTATDKSTGKANKITITNDKGRLSKEEIERMVQEAEKYKAEDEVQRERVSAKNALESYAFNMKSAVEDEGLKGKISEADKKKVLDKCQEVISWLDANTLAEKDEFEHKRKELEQVCNPIISGLYQGAGGPGPGGFGAQGPKGGSGSGPTIEEVD

SEQ ID NO: 215 - protein, 641 aa, Homo sapiens; identical to SEQ ID NO: 214

SEQ ID NO: 216 - protein, 858 aa, Homo sapiens
MSVVGLDVGSQSCYIAVARAGGIETIANEFSDRCTPSVISFGSKNRTIGVAAKNQQITHANNTVSNFKRFHGRAFNDPFIQKEKENLSYDLVPLKNGGVGIKVMYMGEEHLFSVEQITAMLLTKLKETAENSLKKPVTDCVISVPSFFTDAERRSVLDAAQIVGLNCLRLMNDMTAVALNYGIYKQDLPSLDEKPRIVVFVDMGHSAFQVSACAFNKGKLKVLGTAFDPFLGGKNFDEKLVEHFCAEFKTKYKLDAKSKIRALLRLYQECEKLKKLMSSNSTDLPLNIECFMNDKDVSGKMNRSQFEELCAELLQKIEVPLYSLLEQTHLKVEDVSAVEIVGGATRIPAVKERIAKFFGKDISTTLNADEAVARGCALQCAILSPAFKVREFSVTDAVPFPISLIWNHDSEDTEGVHEVFSRNHAAPFSKVLTFLRRGPFELEAFYSDPQGVPYPEAKIGRFVVQNVSAQKDGEKSRVKVKVRVNTHGIFTISTASMVEKVPTEENEMSSEADMECLNQRPPENPDTDKNVQQDNSEAGTQPQVQTDAQQTSQSPPSPELTSEENKIPDADKANEKKVDQPPEAKKPKIKVVNVELPIEANLVWQLGKDLLNMYIETEGKMIMQDKLEKERNDAKNAVEEYVYEFRDKLCGPYEKFICEQDHQNFLRLLTETEDWLYEEGEDQAKQAYVDKLEELMKIGTPVKVRFQEAEERPKMFEELGQRLQHYAKIAADFRNKDEKYNHIDESEMKKVEKSVNEVMEWMNNVMNAQAKKSLDQDPVVRAQEIKTKIKELNNTCEPVVTQPKPKIESPKLERTPNGPNIDKKEEDLEDKNNFGAEPPHQNGECYPNEKNSVNMDLD

SEQ ID NO: 217 - protein, 639 aa, Homo sapiens
MSARGPAIGIDLGTTYSCVGVFQHGKVEIIANDQGNRTTPSYVAFTDTERLIGDAAKNQVAMNPTNTIFDAKRLIGRKFEDATVQSDMKHWPFRVVSEGGKPKVQVEYKGETKTFFPEEISSMVLTKMKEIAEAYLGGKVHSAVITVPAYFNDSQRQATKDAGTITGLNVLRIINEPTAAAIAYGLDKKGCAGGEKNVLIFDLGGGTFDVSILTIEDGIFEVKSTAGDTHLGGEDFDNRMVSHLAEEFKRKHKKDIGPNKRAVRRLRTACERAKRTLSSSTQASIEIDSLYEGVDFYTSITRARFEELNADLFRGTLEPVEKALRDAKLDKGQIQEIVLVGGSTRIPKIQKLLQDFFNGKELNKSINPDEAVAYGAAVQAAILIGDKSENVQDLLLLDVTPLSLGIETAGGVMTPLIKRNTTIPTKQTQTFTTYSDNQSSVLVQVYEGERAMTKDNNLLGKFDLTGIPPAPRGVPQIEVTFDIDANGILNVTAADKSTGKENKITITNDKGRLSKDDIDRMVQEAERYKSEDEANRDRVAAKNALESYTYNIKQTVEDEKLRGKISEQDKNKILDKCQEVINWLDRNQMAEKDEYEHKQKELERVCNPIISKLYQGGPGGGSGGGGSGASGGPTIEEVD

SEQ ID NO: 218 - protein, 150 aa, Homo sapiens
MAKIILRHLIEIPVRYQEEFEARGLEDCRLDHALYALPGPTIVDLRKTRAAQSPPVDSAAETPPREGKSHFQILLDVVQFLPEDIIIQTFEGWLLIKAQHGTRMDEHGFISRSFTRQYKLPDGVEIKDLSAVLCHDGILVVEVKDPVGTK

SEQ ID NO: 219 - protein, 239 aa, Homo sapiens
MAHAGRTGYDNREIVMKYIHYKLSQRGYEWDAGDVGAAPPGAAPAPGIFSSQPGHTPHPAASRDPVARTSPLQTPAAPGAAAGPALSPVPPVVHLTLRQAGDDFSRRYRRDFAEMSSQLHLTPFTARGRFATVVEELFRDGVNWGRIVAFFEFGGVMCVESVNREMSPLVDNIALWMTEYLNRHLHTWIQDNGGWDAFVELYGPSMRPLFDFSWLSLKTLLSLALVGACITLGAYLGHK

SEQ ID NO: 220 - protein, 205 aa, Homo sapiens
MAHAGRTGYDNREIVMKYIHYKLSQRGYEWDAGDVGAAPPGAAPAPGIFSSQPGHTPHPAASRDPVARTSPLQTPAAPGAAAGPALSPVPPVVHLTLRQAGDDFSRRYRRDFAEMSSQLHLTPFTARGRFATVVEELFRDGVNWGRIVAFFEFGGVMCVESVNREMSPLVDNIALWMTEYLNRHLHTWIQDNGGWVGALGDVSLG

SEQ ID NO: 221 - protein, 614 aa, Homo sapiens
MGNLKSVAQEPGPPCGLGLGLGLGLCGKQGPATPAPEPSRAPASLLPPAPEHSPPSSPLTQPPEGPKFPRVKNWEVGSITYDTLSAQAQQDGPCTPRRCLGSLVFPRKLQGRPSPGPPAPEQLLSQARDFINQYYSSIKRSGSQAHEQRLQEVEAEVAATGTYQLRESELVFGAKQAWRNAPRCVGRIQWGKLQVFDARDCRSAQEMFTYICNHIKYATNRGNLRSAITVFPQRCPGRGDFRIWNSQLVRYAGYRQQDGSVRGDPANVEITELCIQHGWTPGNGRFDVLPLLLQAPDDPPELFLLPPELVLEVPLEHPTLEWFAALGLRWYALPAVSNMLLEIGGLEFPAAPFSGWYMSTEIGTRNLCDPHRYNILEDVAVCMDLDTRTTSSLWKDKAAVEINVAVLHSYQLAKVTIVDHHAATASFMKHLENEQKARGGCPADWAWIVPPISGSLTPVFHQEMVNYFLSPAFRYQPDPWKGSAAKGTGITRKKTFKEVANAVKISASLMGTVMAKRVKATILYGSETGRAQSYAQQLGRLFRKAFDPRVLCMDEYDVVSLEHETLVLVVTSTFGNGDPPENGERWGFAMLPRLVSNSWVQAIHLPRPPKVLRL

SEQ ID NO: 222 - protein, 1203 aa, Homo sapiens
MGNLKSVAQEPGPPCGLGLGLGLGLCGKQGPATPAPEPSRAPASLLPPAPEHSPPSSPLTQPPEGPKFPRVKNWEVGSITYDTLSAQAQQDGPCTPRRCLGSLVFPRKLQGRPSPGPPAPEQLLSQARDFINQYYSSIKRSGSQAHEQRLQEVEAEVAATGTYQLRESELVFGAKQAWRNAPRCVGRIQWGKLQVFDARDCRSAQEMFTYICNHIKYATNRGNLRSAITVFPQRCPGRGDFRIWNSQLVRYAGYRQQDGSVRGDPANVEITELCIQHGWTPGNGRFDVLPLLLQAPDDPPELFLLPPELVLEVPLEHPTLEWFAALGLRWYALPAVSNMLLEIGGLEFPAAPFSGWYMSTEIGTRNLCDPHRYNILEDVAVCMDLDTRTTSSLWKDKAAVEINVAVLHSYQLAKVTIVDHHAATASFMKHLENEQKARGGCPADWAWIVPPISGSLTPVFHQEMVNYFLSPAFRYQPDPWKGSAAKGTGITRKKTFKEVANAVKISASLMGTVMAKRVKATILYGSETGRAQSYAQQLGRLFRKAFDPRVLCMDEYDVVSLEHETLVLVVTSTFGNGDPPENGESFAAALMEMSGPYNSSPRPEQHKSYKIRFNSISCSDPLVSSWRRKRKESSNTDSAGALGTLRFCVFGLGSRAYPHFCAFARAVDTRLEELGGERLLQLGQGDELCGQEEAFRGWAQAAFQAACETFCVGEDAKAAARDIFSPKRSWKRQRYRLSAQAEGLQLLPGLIHVHRRKMFQATIRSVENLQSSKSTRATILVRLDTGGQEGLQYQPGDHIGVCPPNRPGLVEALLSRVEDPPAPTEPVAVEQLEKGSPGGPPPGWVRDPRLPPCTLRQALTFFLDITSPPSPQLLRLLSTLAEEPREQQELEALSQDPRRYEEWKWFRCPTLLEVLEQFPSVALPAPLLLTQLPLLQPRYYSVSSAPSTHPGEIHLTVAVLAYRTQDGLGPLHYGVCSTWLSQLKPGDPVPCFIRGAPSFRLPPDPSLPCILVGPGTGIAPFRGFWQERLHDIESKGLQPTPMTLVFGCRCSQLDHLYRDEVQNAQQRGVFGRVLTAFSREPDNPKTYVQDILRTELAAEVHRVLCLERGHMFVCGDVTMATNVLQTVQRILATEGDMELDEAGDVIGVLRDQQRYHEDIFGLTLRTQEVTSRIRTQSFSLQERQLRGAVPWAFDPPGSDTNSP

SEQ ID NO: 223 - protein, 629 aa, Homo sapiens
MGNLKSVAQEPGPPCGLGLGLGLGLCGKQGPATPAPEPSRAPASLLPPAPEHSPPSSPLTQPPEGPKFPRVKNWEVGSITYDTLSAQAQQDGPCTPRRCLGSLVFPRKLQGRPSPGPPAPEQLLSQARDFINQYYSSIKRSGSQAHEQRLQEVEAEVAATGTYQLRESELVFGAKQAWRNAPRCVGRIQWGKLQVFDARDCRSAQEMFTYICNHIKYATNRGNLRSAITVFPQRCPGRGDFRIWNSQLVRYAGYRQQDGSVRGDPANVEITELCIQHGWTPGNGRFDVLPLLLQAPDDPPELFLLPPELVLEVPLEHPTLEWFAALGLRWYALPAVSNMLLEIGGLEFPAAPFSGWYMSTEIGTRNLCDPHRYNILEDVAVCMDLDTRTTSSLWKDKAAVEINVAVLHSYQLAKVTIVDHHAATASFMKHLENEQKARGGCPADWAWIVPPISGSLTPVFHQEMVNYFLSPAFRYQPDPWKGSAAKGTGITRKKTFKEVANAVKISASLMGTVMAKRVKATILYGSETGRAQSYAQQLGRLFRKAFDPRVLCMDEYDVVSLEHETLVLVVTSTFGNGDPPENGEGLTLWPRLECSSTITAHCSLNLLDSSNPPTSTSQVVGTTGACHDA

SEQ ID NO: 224 - protein, 596 aa, Homo sapiens
MGNLKSVAQEPGPPCGLGLGLGLGLCGKQGPATPAPEPSRAPASLLPPAPEHSPPSSPLTQPPEGPKFPRVKNWEVGSITYDTLSAQAQQDGPCTPRRCLGSLVFPRKLQGRPSPGPPAPEQLLSQARDFINQYYSSIKRSGSQAHEQRLQEVEAEVAATGTYQLRESELVFGAKQAWRNAPRCVGRIQWGKLQVFDARDCRSAQEMFTYICNHIKYATNRGNLRSAITVFPQRCPGRGDFRIWNSQLVRYAGYRQQDGSVRGDPANVEITELCIQHGWTPGNGRFDVLPLLLQAPDDPPELFLLPPELVLEVPLEHPTLEWFAALGLRWYALPAVSNMLLEIGGLEFPAAPFSGWYMSTEIGTRNLCDPHRYNILEDVAVCMDLDTRTTSSLWKDKAAVEINVAVLHSYQLAKVTIVDHHAATASFMKHLENEQKARGGCPADWAWIVPPISGSLTPVFHQEMVNYFLSPAFRYQPDPWKGSAAKGTGITRKKTFKEVANAVKISASLMGTVMAKRVKATILYGSETGRAQSYAQQLGRLFRKAFDPRVLCMDEYDVVSLEHETLVLVVTSTFGNGDPPENGESVSLPEVSVTTE

SEQ ID NO: 225 - protein, 1468 aa, Homo sapiens
MEDHMFGVQQIQPNVISVRLFKRKVGGLGFLVKERVSKPPVIISDLIRGGAAEQSGLIQAGDIILAVNGRPLVDLSYDSALEVLRGIASETHVVLILRGPEGFTTHLETTFTGDGTPKTIRVTQPLGPPTKAVDLSHQPPAGKEQPLAVDGASGPGNGPQHAYDDGQEAGSLPHANGLAPRPPGQDPAKKATRVSLQGRGENNELLKEIEPVLSLLTSGSRGVKGGAPAKAEMKDMGIQVDRDLDGKSHKPLPLGVENDRVFNDLWGKGNVPVVLNNPYSEKEQPPTSGKQSPTKNGSPSKCPRFLKVKNWETEVVLTDTLHLKSTLETGCTEYICMGSIMHPSQHARRPEDVRTKGQLFPLAKEFIDQYYSSIKRFGSKAHMERLEEVNKEIDTTSTYQLKDTELIYGAKHAWRNASRCVGRIQWSKLQVFDARDCTTAHGMFNYICNHVKYATNKGNLRSAITIFPQRTDGKHDFRVWNSQLIRYAGYKQPDGSTLGDPANVQFTEICIQQGWKPPRGRFDVLPLLLQANGNDPELFQIPPELVLEVPIRHPKFEWFKDLGLKWYGLPAVSNMLLEIGGLEFSACPFSGWYMGTEIGVRDYCDNSRYNILEEVAKKMNLDMRKTSSLWKDQALVEINIAVLYSFQSDKVTIVDHHSATESFIKHMENEYRCRGGCPADWVWIVPPMSGSITPVFHQEMLNYRLTPSFEYQPDPWNTHVWKGTNGTPTKRRAIGFKKLAEAVKFSAKLMGQAMAKRVKATILYATETGKSQAYAKTLCEIFKHAFDAKVMSMEEYDIVHLEHETLVLVVTSTFGNGDPPENGEKFGCALMEMRHPNSVQEERKYPEPLRFFPRKGPPLPNGDTEVHGLAAARDSQHRSYKVRFNSVSSYSDSQKSSGDGPDLRDNFESAGPLANVRFSVFGLGSRAYPHFCAFGHAVDTLLEELGGERILKMREGDELCGQEEAFRTWAKKVFKAACDVFCVGDDVNIEKANNSLISNDRSWKRNKFRLTFVAEAPELTQGLSNVHKKRVSAARLLSRQNLQSPKSSRSTIFVRLHTNGSQELQYQPGDHLGVFPGNHEDLVNALIERLEDAPPVNQMVKVELLEERNTALGVISNWTDELRLPPCTIFQAFKYYLDITTPPTPLQLQQFASLATSEKEKQRLLVLSKGLQEYEEWKWGKNPTIVEVLEEFPSIQMPATLLLTQLSLLQPRYYSISSSPDMYPDEVHLTVAIVSYRTRDGEGPIHHGVCSSWLNRIQADELVPCFVRGAPSFHLPRNPQVPCILVGPGTGIAPFRSFWQQRQFDIQHKGMNPCPMVLVFGCRQSKIDHIYREETLQAKNKGVFRELYTAYSREPDKPKKYVQDILQEQLAESVYRALKEQGGHIYVCGDVTMAADVLKAIQRIMTQQGKLSAEDAGVFISRMRDDNRYHEDIFGVTLRTYEVTNRLRSESIAFIEESKKDTDEVFSS

SEQ ID NO: 226 - protein, 1434 aa, Homo sapiens
MEDHMFGVQQIQPNVISVRLFKRKVGGLGFLVKERVSKPPVIISDLIRGGAAEQSGLIQAGDIILAVNGRPLVDLSYDSALEVLRGIASETHVVLILRGPEGFTTHLETTFTGDGTPKTIRVTQPLGPPTKAVDLSHQPPAGKEQPLAVDGASGPGNGPQHAYDDGQEAGSLPHANGLAPRPPGQDPAKKATRVSLQGRGENNELLKEIEPVLSLLTSGSRGVKGGAPAKAEMKDMGIQVDRDLDGKSHKPLPLGVENDRVFNDLWGKGNVPVVLNNPYSEKEQPPTSGKQSPTKNGSPSKCPRFLKVKNWETEVVLTDTLHLKSTLETGCTEYICMGSIMHPSQHARRPEDVRTKGQLFPLAKEFIDQYYSSIKRFGSKAHMERLEEVNKEIDTTSTYQLKDTELIYGAKHAWRNASRCVGRIQWSKLQVFDARDCTTAHGMFNYICNHVKYATNKGNLRSAITIFPQRTDGKHDFRVWNSQLIRYAGYKQPDGSTLGDPANVQFTEICIQQGWKPPRGRFDVLPLLLQANGNDPELFQIPPELVLEVPIRHPKFEWFKDLGLKWYGLPAVSNMLLEIGGLEFSACPFSGWYMGTEIGVRDYCDNSRYNILEEVAKKMNLDMRKTSSLWKDQALVEINIAVLYSFQSDKVTIVDHHSATESFIKHMENEYRCRGGCPADWVWIVPPMSGSITPVFHQEMLNYRLTPSFEYQPDPWNTHVWKGTNGTPTKRRAIGFKKLAEAVKFSAKLMGQAMAKRVKATILYATETGKSQAYAKTLCEIFKHAFDAKVMSMEEYDIVHLEHETLVLVVTSTFGNGDPPENGEKFGCALMEMRHPNSVQEERKSYKVRFNSVSSYSDSQKSSGDGPDLRDNFESAGPLANVRFSVFGLGSRAYPHFCAFGHAVDTLLEELGGERILKMREGDELCGQEEAFRTWAKKVFKAACDVFCVGDDVNIEKANNSLISNDRSWKRNKFRLTFVAEAPELTQGLSNVHKKRVSAARLLSRQNLQSPKSSRSTIFVRLHTNGSQELQYQPGDHLGVFPGNHEDLVNALIERLEDAPPVNQMVKVELLEERNTALGVISNWTDELRLPPCTIFQAFKYYLDITTPPTPLQLQQFASLATSEKEKQRLLVLSKGLQEYEEWKWGKNPTIVEVLEEFPSIQMPATLLLTQLSLLQPRYYSISSSPDMYPDEVHLTVAIVSYRTRDGEGPIHHGVCSSWLNRIQADELVPCFVRGAPSFHLPRNPQVPCILVGPGTGIAPFRSFWQQRQFDIQHKGMNPCPMVLVFGCRQSKIDHIYREETLQAKNKGVFRELYTAYSREPDKPKKYVQDILQEQLAESVYRALKEQGGHIYVCGDVTMAADVLKAIQRIMTQQGKLSAEDAGVFISRMRDDNRYHEDIFGVTLRTYEVTNRLRSESIAFIEESKKDTDEVFSS

SEQ ID NO: 227 - protein, 1098 aa, Homo sapiens
MGSIMHPSQHARRPEDVRTKGQLFPLAKEFIDQYYSSIKRFGSKAHMERLEEVNKEIDTTSTYQLKDTELIYGAKHAWRNASRCVGRIQWSKLQVFDARDCTTAHGMFNYICNHVKYATNKGNLRSAITIFPQRTDGKHDFRVWNSQLIRYAGYKQPDGSTLGDPANVQFTEICIQQGWKPPRGRFDVLPLLLQANGNDPELFQIPPELVLEVPIRHPKFEWFKDLGLKWYGLPAVSNMLLEIGGLEFSACPFSGWYMGTEIGVRDYCDNSRYNILEEVAKKMNLDMRKTSSLWKDQALVEINIAVLYSFQSDKVTIVDHHSATESFIKHMENEYRCRGGCPADWVWIVPPMSGSITPVFHQEMLNYRLTPSFEYQPDPWNTHVWKGTNGTPTKRRAIGFKKLAEAVKFSAKLMGQAMAKRVKATILYATETGKSQAYAKTLCEIFKHAFDAKVMSMEEYDIVHLEHETLVLVVTSTFGNGDPPENGEKFGCALMEMRHPNSVQEERKSYKVRFNSVSSYSDSQKSSGDGPDLRDNFESAGPLANVRFSVFGLGSRAYPHFCAFGHAVDTLLEELGGERILKMREGDELCGQEEAFRTWAKKVFKAACDVFCVGDDVNIEKANNSLISNDRSWKRNKFRLTFVAEAPELTQGLSNVHKKRVSAARLLSRQNLQSPKSSRSTIFVRLHTNGSQELQYQPGDHLGVFPGNHEDLVNALIERLEDAPPVNQMVKVELLEERNTALGVISNWTDELRLPPCTIFQAFKYYLDITTPPTPLQLQQFASLATSEKEKQRLLVLSKGLQEYEEWKWGKNPTIVEVLEEFPSIQMPATLLLTQLSLLQPRYYSISSSPDMYPDEVHLTVAIVSYRTRDGEGPIHHGVCSSWLNRIQADELVPCFVRGAPSFHLPRNPQVPCILVGPGTGIAPFRSFWQQRQFDIQHKGMNPCPMVLVFGCRQSKIDHIYREETLQAKNKGVFRELYTAYSREPDKPKKYVQDILQEQLAESVYRALKEQGGHIYVCGDVTMAADVLKAIQRIMTQQGKLSAEDAGVFISRMRDDNRYHEDIFGVTLRTYEVTNRLRSESIAFIEESKKDTDEVFSS

SEQ ID NO: 228 - protein, 1098 aa, Homo sapiens; identical to SEQ ID NO: 227

SEQ ID NO: 229 - protein, 1153 aa, Homo sapiens
MACPWKFLFKTKFHQYAMNGEKDINNNVEKAPCATSSPVTQDDLQYHNLSKQQNESPQPLVETGKKSPESLVKLDATPLSSPRHVRIKNWGSGMTFQDTLHHKAKGILTCRSKSCLGSIMTPKSLTRGPRDKPTPPDELLPQAIEFVNQYYGSFKEAKIEEHLARVEAVTKEIETTGTYQLTGDELIFATKQAWRNAPRCIGRIQWSNLQVFDARSCSTAREMFEHICRHVRYSTNNGNIRSAITVFPQRSDGKHDFRVWNAQLIRYAGYQMPDGSIRGDPANVEFTQLCIDLGWKPKYGRFDVVPLVLQANGRDPELFEIPPDLVLEVAMEHPKYEWFRELELKWYALPAVANMLLEVGGLEFPGCPFNGWYMGTEIGVRDFCDVQRYNILEEVGRRMGLETHKLASLWKDQAVVEINIAVLHSFQKQNVTIMDHHSAAESFMKYMQNEYRSRGGCPADWIWLVPPMSGSITPVFHQEMLNYVLSPFYYYQVEAWKTHVWQDEKRRPKRREIPLKVLVKAVLFACMLMRKTMASRVRVTILFATETGKSEALAWDLGALFSCAFNPKVVCMDKYRLSCLEEERLLLVVTSTFGNGDCPGNGEKLKKSLFMLKELNNKFRYAVFGLGSSMYPRFCAFAHDIDQKLSHLGASQLTPMGEGDELSGQEDAFRSWAVQTFKAACETFDVRGKQHIQIPKLYTSNVTWDPHHYRLVQDSQPLDLSKALSSMHAKNVFTMRLKSRQNLQSPTSSRATILVELSCEDGQGLNYLPGEHLGVCPGNQPALVQGILERVVDGPTPHQTVRLEALDESGSYWVSDKRLPPCSLSQALTYFLDITTPPTQLLLQKLAQVATEEPERQRLEALCQPSEYSKWKFTNSPTFLEVLEEFPSLRVSAGFLLSQLPILKPRFYSISSSRDHTPTEIHLTVAVVTYHTRDGQGPLHHGVCSTWLNSLKPQDPVPCFVRNASGFHLPEDPSHPCILIGPGTGIAPFRSFWQQRLHDSQHKGVRGGRMTLVFGCRRPDEDHIYQEEMLEMAQKGVLHAVHTAYSRLPGKPKVYVQDILRQQLASEVLRVLHKEPGHLYVCGDVRMARDVAHTLKQLVAAKLKLNEEQVEDYFFQLKSQKRYHEDIFGAVFPYEAKKDRVAVQPSSLEMSAL

SEQ ID NO: 230 - protein, 153 aa, Homo sapiens [sequence omitted]

SEQ ID NO: 231 - protein, 137 aa, Homo sapiens
MGLTSQLLPPLFFLLACAGNFVHGHKCDITLQEIIKTLNSLTEQKNTTEKETFCRAATVLRQFYSHHEKDTRCLGATAQQFHRHKQLIRFLKRLDRNLWGLAGLNSCPVKEANQSTLENFLERLKTIMREKYSKCSS

SEQ ID NO: 232 - protein, 178 aa, Homo sapiens
MHSSALLCCLVLLTGVRASPGQGTQSENSCTHFPGNLPNMLRDLRDAFSRVKTFFQMKDQLDNLLLKESLLEDFKGYLGCQALSEMIQFYLEEVMPQAENQDPDIKAHVNSLGENLKTLRLRLRRCHRFLPCENKSKAVEQVKNAFNKLQEKGIYKAMSEFDIFINYIEAYMTMKIRN

SEQ ID NO: 233 - protein, 390 aa, Homo sapiens
MPPSGLRLLPLLLPLLWLLVLTPGRPAAGLSTCKTIDMELVKRKRIEAIRGQILSKLRLASPPSQGEVPPGPLPEAVLALYNSTRDRVAGESAEPEPEPEADYYAKEVTRVLMVETHNEIYDKFKQSTHSIYMFFNTSELREAVPEPVLLSRAELRLLRLKLKVEQHVELYQKYSNNSWRYLSNRLLAPSDSPEWLSFDVTGVVRQWLSRGGEIEGFRLSAHCSCDSRDNTLQVDINGFTTGRRGDLATIHGMNRPFLLLMATPLERAQHLQSSRHRRALDTNYCFSSTEKNCCVRQLYIDFRKDLGWKWIHEPKGYHANFCLGPCPYIWSLDTQYSKVLALYNQHNPGASAAPCCVPQALEPLPIVYYVGRKPKVEQLSNMIVRSCKCS

SEQ ID NO: 234 - protein, 288 aa, Homo sapiens
MERPQPDSMPQDLSEALKEATKEVHTQAENAEFMRNFQKGQVTRDGFKLVMASLYHIYVALEEEIERNKESPVFAPVYFPEELHRKAALEQDLAFWYGPRWQEVIPYTPAMQRYVKRLHEVGRTEPELLVAHAYTRYLGDLSGGQVLKKIAQKALDLPSSGEGLAFFTFPNIASATKFKQLYRSRMNSLEMTPAVRQRVIEEAKTAFLLNIQLFEELQELLTHDTKDQSPSRAPGLRQRASNKVQDSAPVETPRGKPPLNTRSQAPLLRWVLTLSFLVATVAVGLYAM

SEQ ID NO: 235 - protein, 348 aa, Homo sapiens
MSLMVVSMACVGFFLLQGAWPHEGVHRKPSLLAHPGRLVKSEETVILQCWSDVRFEHFLLHREGKFKDTLHLIGEHHDGVSKANFSIGPMMQDLAGTYRCYGSVTHSPYQLSAPSDPLDIVITGLYEKPSLSAQPGPTVLAGESVTLSCSSRSSYDMYHLSREGEAHECRFSAGPKVNGTFQADFPLGPATHGGTYRCFGSFRDSPYEWSNSSDPLLVSVTGNPSNSWPSPTEPSSKTGNPRHLHILIGTSVVIILFILLFFLLHRWCSNKKNAAVMDQESAGNRTANSEDSDEQDPQEVTYTQLNHCVFTQRKITRPSQRPKTPPTDIIVYTELPNAESRSKVVSCP

SEQ ID NO: 236 - protein, 304 aa, Homo sapiens
MSLMVVSMACVGFFLLQGAWPHEGVHRKPSLLAHPGPLVKSEETVILQCWSDVRFEHFLLHREGKYKDTLHLIGEHHDGVSKANFSIGPMMQDLAGTYRCYGSVTHSPYQLSAPSDPLDIVITGLYEKPSLSAQPGPTVLAGESVTLSCSSRSSYDMYHLSREGEAHERRFSAGPKVNGTFQADFPLGPATHGGTYRCFGSFRDSPYEWSNSSDPLLVSVTGNPSNSWPSPTEPSSKTGNPRHLHVLIGTSVVKIPFTILLFFLLHRWCSNKKNAAVMDQEPAGNRTVNSEDSDEQDHQEVSYA

SEQ ID NO: 237 - protein, 341 aa, Homo sapiens
MSLMVVSMVCVGFFLLQGAWPHEGVHRKPSLLAHPGPLVKSEETVILQCWSDVRFQHFLLHREGKFKDTLHLIGEHHDGVSKANFSIGPMMQDLAGTYRCYGSVTHSPYQLSAPSDPLDIVITGLYEKPSLSAQPGPTVLAGESVTLSCSSRSSYDMYHLSREGEAHERRFSAGPKVNGTFQADFPLGPATHGGTYRCFGSFRDSPYEWSNSSDPLLVSVTGNPSNSWPSPTEPSSETGNPRHLHVLIGTSVVIILFILLLFFLLHRWCCNKKNAVVMDQEPAGNRTVNREDSDEQDPQEVTYAQLNHCVFTQRKITRPSQRPKTPPTDIIVYTELPNAEP

SEQ ID NO: 238 - protein, 304 aa, Homo sapiens
MSLMVISMACVAFFLLQGAWPHEGFRRKPSLLAHPGPLVKSEETVILQCWSDVMFEHFLLHREGTFNHTLRLIGEHIDGVSKGNFSIGRMTQDLAGTYRCYGSVTHSPYQLSAPSDPLDIVITGLYEKPSLSAQPGPTVLAGESVTLSCSSRSSYDMYHLSREGEAHERRLPAGPKVNRTFQADFPLDPATHGGTYRCFGSFRDSPYEWSKSSDPLLVSVTGNSSNSWPSPTEPSSETGNPRHLHVLIGTSVVKLPFTILLFFLLHRWCSNKKNASVMDQGPAGNRTVNREDSDEQDHQEVSYA

SEQ ID NO: 239 - protein, 342 aa, Homo sapiens
MSMSPTVIILACLGFFLDQSVWAHVGGQDKPFCSAWPSAVVPQGGHVTLRCHYRRGFNIFTLYKKDGVPVPELYNRIFWNSFLISPVTPAHAGTYRCRGFHPHSPTEWSAPSNPLVIMVTGLYEKPSLTARPGPTVRAGENVTLSCSSQSSFDIYHLSREGEAHELRLPAVPSINGTFQADFPLGPATHGETYRCFGSFHGSPYEWSDPSDPLPVSVTGNPSSSWPSPTEPSFKTDAAVMNQEPAGHRTVNREDSDEQDPQEVTYAQLDHCIFTQRKITGPSQRSKRPSTDTSVCIELPNAEPRALSPAHEHHSQALMGSSRETTALSQTQLASSNVPAAGI

SEQ ID NO: 240 - protein, 455 aa, Homo sapiens
MSLTVVSMACVGFFLLQGAWPLMGGQDKPFLSARPSTVVPRGGHVALQCHYRRGFNNFMLYKEDRSHVPIFHGRIFQESFIMGPVTPAHAGTYRCRGSRPHSLTGWSAPSNPLVIMVTGNHRKPSLLAHPGPLLKSGETVILQCWSDVMFEHFFLHREGISEDPSRLVGQIHDGVSKANFSIGPLMPVLAGTYRCYGSVPHSPYQLSAPSDPLDIVITGLYEKPSLSAQPGPTVQAGENVTLSCSSWSSYDIYHLSREGEAHERRLRAVPKVNRTFQADFPLGPATHGGTYRCFGSFRALPCVWSNSSDPLLVSVTGNPSSSWPSPTEPSSKSGICRHLHVLIGTSVVIFLFILLLFFLLYRWCSNKKNAAVMDQEPAGDRTVNRQDSDEQDPQEVTYAQLDHCVFIQRKISRPSQRPKTPLTDTSVYTELPNAEPRSKVVSCPRAPQSGLEGVF

SEQ ID NO: 241 - protein, 410 aa, Homo sapiens
MSLMVVSMACVGFFLLEGPWPHVGGQDKPFLSAWPGTVVSEGQHVTLQCRSRLGFNEFSLSKEDGMPVPELYNRIFRNSFLMGPVTPAHAGTYRCCSSHPHSPTGWSAPSNPVVIMVTGVHRKPSLLAHPGPLVKSGETVILQCWSDVRFERFLLHREGITEDPLRLVGQLHDAGSQVNYSMGPMTPALAGTYRCFGSVTHLPYELSAPSDPLDIVVVGLYGKPSLSAQPGPTVQAGENVTLSCSSRSLFDIYHLSREAEAGELRLTAVLRVNGTFQANFPLGPVTHGGNYRCFGSFRALPHAWSDPSDPLPVSVTGNSRHLHVLIGTSVVIIPFAILLFFLLHRWCANKKNAVVMDQEPAGNRTVNREDSDEQDPQEVTYAQLNHCVFTQRKITRPSQRPKTPPTDTSV

SEQ ID NO: 242 - protein, 348 aa, Homo sapiens
MSLLVVSMACVGFFLLQGAWPHEGVHRKPSLLAHPGRLVKSEETVILQCWSDVMFEHFLLHREGMFNDTLRLIGEHHDGVSKANFSISRMTQDLAGTYRCYGSVTHSPYQVSAPSDPLDIVIIGLYEKPSLSAQLGPTVLAGENVTLSCSSRSSYDMYHLSREGEAHERRLPAGPKVNGTFQADFPLGPATHGGTYRCFGSFHDSPYEWSKSSDPLLVSVTGNPSNSWPSPTEPSSKTGNPRHLHILIGTSVVIILFILLFFLLHRWCSNKKNAAVMDQESAGNRTANSEDSDEQDPQEVTYTQLNHCVFTQRKITRPSQRPKTPPTDIIVYTELPNAESRSKVVSCP

SEQ ID NO: 243 - protein, 304 aa, Homo sapiens
MSLTVVSMACVGFFLLQGAWPHEGVHRKPSLLAHPGRLVKSEETVILQCWSDVMFEHFLLHREGMFNDTLRLIGEHHDGVSKANFSISRMKQDLAGTYRCYGSVTHSPYQLSAPSDPLDIVIIGLYEKPSLSAQPGPTVLAGENVTLSCSSRSSYDMYHLSREGEAHERRLPAGTKVNGTFQANFPLGPATHGGTYRCFGSFRDSPYEWSKSSDPLLVSVTGNPSNSWPSPTEPSSETGNPRHLHVLIGTSVVKIPFTILLFFLLHRWCSDKKNAAVMDQEPAGNRTVNSEDSDEQDHQEVSYA

SEQ ID NO: 244 - protein, 444 aa, Homo sapiens
MSLMVVSMACVGLFLVQRAGPHMGGQDKPFLSAWPSAVVPRGGHVTLRCHYRHRFNNFMLYKEDRIHIPIFHGRIFQESFNMSPVTTAHAGNYTCRGSHPHSPTGWSAPSNPVVIMVTGNHRKPSLLAHPGPLVKSGERVILQCWSDIMFEHFFLHKEGISKDPSRLVGQIHDGVSKANFSIGPMMLALAGTYRCYGSVTHTPYQLSAPSDPLDIVVTGPYEKPSLSAQPGPKVQAGESVTLSCSSRSSYDMYHLSREGGAHERRLPAVRKVNRTFQADFPLGPATHGGTYRCFGSFRHSPYEWSDPSDPLLVSVTGNPSSSWPSPTEPSSKSGNPRHLHILIGTSVVIILFILLLFFLLHLWCSNKKNAAVMDQEPAGNRTANSEDSDEQDPEEVTYAQLDHCVFTQRKITRPSQRPKTPPTDTILYTELPNAKPRSKVVSCP

SEQ ID NO: 245 - protein, 304 aa, Homo sapiens
MSLMVIIMACVGFFLLQGAWPQEGVHRKPSFLALPGHLVKSEETVILQCWSDVMFEHFLLHREGKFNNTLHLIGEHHDGVSKANFSIGPMMPVLAGTYRCYGSVPHSPYQLSAPSDPLDMVIIGLYEKPSLSAQPGPTVQAGENVTLSCSSRSSYDMYHLSREGEAHERRLPAVRSINGTFQADFPLGPATHGGTYRCFGSFRDAPYEWSNSSDPLLVSVTGNPSNSWPSPTEPSSKTGNPRHLHVLIGTSVVKIPFTILLFFLLHRWCSDKKNAAVMDQEPAGNRTVNSEDSDEQDHQEVSYA

SEQ ID NO: 246 - protein, 375 aa, Homo sapiens
MSLMVISMACVGFFLLQGAWTHEGGQDKPLLSAWPSAVVPRGGHVTLLCRSRLGFTIFSLYKEDGVPVPELYNKIFWKSILMGPVTPAHAGTYRCRGSHPRSPIEWSAPSNPLVIVVTGLFGKPSLSAQPGPTVRTGENVTLSCSSRSSFDMYHLSREGRAHEPRLPAVPSVNGTFQADFPLGPATHGGTYTCFGSLHDSPYEWSDPSDPLLVSVTGNSSSSSSSPTEPSSKTGIRRHLHILIGTSVAIILFIILFFFLLHCCCSNKKNAAVMDQEPAGDRTVNREDSDDQDPQEVTYAQLDHCVFTQTKITSPSQRPKTPPTDTTMYMELPNAKPRSLSPAHKHHSQALRGSSRETTALSQNRVASSHVPAAGI

SEQ ID NO: 247 - protein, 273 aa, Homo sapiens
MSMSPTVIILACLGFFLDQSVWAHVGGQDKPFCSAWPSAVVPQGGHVTLRCHYRRGFNIFTLYKKDGVPVPELYNRIFWNSFLISPVTPAHAGTYRCRGFHPHSPTEWSAPSNPLVIMVTGLYEKPSLTARPGPTVRAGENVTLSCSSQSSFDIYHLSREGEAHELRLPAVPSINGTFQADFPLGPATHGETYRCFGSFHGSPYEWSDPSDPLPVSVTGNPSSSWPSPTEPSFKTGIARHLHAVIRYSVAIILFTILPFFLLHRWCSKKKMLL

SEQ ID NO: 248 - protein, 377 aa, Homo sapiens
MSMSPTVIILACLGFFLDQSVWAHVGGQDKPFCSAWPSAVVPQGGHVTLRCHYRRGFNIFTLYKKDGVPVPELYNRIFWNSFLISPVTPAHAGTYRCRGFHPHSPTEWSAPSNPLVIMVTGLYEKPSLTARPGPTVRAGENVTLSCSSQSSFDIYHLSREGEAHELRLPAVPSINGTFQADFPLGPATHGETYRCFGSFHGSPYEWSDPSDPLPVSVTGNPSSSWPSPTEPSFKTGIARHLHAVIRYSVAIILFTILPFFLLHRWCSKKKNAAVMNQEPAGHRTVNREDSDEQDPQEVTYAQLDHCIFTQRKITGPSQRSKRPSTDTSVCIELPNAEPRALSPAHEHHSQALMGSSRETTALSQTQLASSNVPAAGI

SEQ ID NO: 249 - protein, 382 aa, Homo sapiens
MLLMVVSMACVGLFLVQRAGPHMGGQDKPFLSAWPSAVVPRGGHVTLRCHYRHRFNNFMLYKEDRIHVPIFHGRIFQEGFNMSPVTTAHAGNYTCRGSHPHSPTGWSAPSNPMVIMVTGNHRKPSLLAHPGPLVKSGERVILQCWSDIMFEHFFLHKEWISKDPSRLVGQIHDGVSKANFSIGSMMRALAGTYRCYGSVTHTPYQLSAPSDPLDIVVTGLYEKPSLSAQPGPKVQAGESVTLSCSSRSSYDMYHLSREGGAHERRLPAVRKVNRTFQADFPLGPATHGGTYRCFGSFRHSPYEWSDPSDPLLVSVTGNPSSSWPSPTEPSSKSGNLRHLHILIGTSVVKIPFTILLFFLLHRWCSNKKKCCCNGPRACREQK

SEQ ID NO: 250 - protein, 375 aa, Homo sapiens
MSLMVISMACVGFFLLQGAWTHEGGQDKPLLSAWPSAVVPRGGHVTLLCRSRLGFTIFSLYKEDGVPVPELYNKIFWKSILMGPVTPAHAGTYRCRGSHPRSPIEWSAPSNPLVIVVTGLFGKPSLSAQPGPTVRTGENVALSCSSRSSFDMYHLSREGRAHEPRLPAVPSVDGTFQADFPLGPATHGGTYTCFSSLHDSPYEWSDPSDPLLVSVTGNSSSSSSSPTEPSSKTGIRRHLHILIGTSVAIILFIILFFFLLHCCCSNKKNAAVMDQGPAGDRTVNREDSDDQDPQEVTYAQLDHCVFTQTKITSPSQRPKAPPTDTTMYMELPNAKPRSLSPAHKHHSQALRGSSRETTALSQNRVASSHVPAAGI

SEQ ID NO: 251 - protein, 438 aa, Homo sapiens
MSLTVVSMACVGFFLLQGAWPLMGGQDKPFLSARPSTVVPRGGHVALQCHYRRGFNNFMLYKEDRSHVPIFHGRIFQESFIMGPVTPAHAGTYRCRGSRPHSLTGWSAPSNPLVIMVTGNHRKPSLLAHPGPLLKSGETVILQCWSDVMFEHFFLHREGISEDPSRLVGQIHDGVSKANFSIGPLMPVLAGTYRCYGSVPHSPYQLSAPSDPLDIVITGLYEKPSLSAQPGPTVQAGENVTLSCSSWSSYDIYHLSREGEAHERRLRAVPKVNRTFQADFPLGPATHGGTYRCFGSFRALPCVWSNSSDPLLVSVTGICRHLHVLIGTSVVIFLFILLLFFLLYRWCSNKKNAAVMDQEPAGDRTVNRQDSDEQDPQEVTYAQLDHCVFIQRKISRPSQRPKTPLTDTSVYTELPNAEPRSKVVSCPRAPQSGLEGVF

SEQ ID NO: 252 - protein, 304 aa, Homo sapiens
MSLMVISMACVGFFWLQGAWPHEGFRRKPSLLAHPGRLVKSEETVILQCWSDVMFEHFLLHREGTFNDTLRLIGEHIDGVSKANFSIGRMRQDLAGTYRCYGSVPHSPYQFSAPSDPLDIVITGLYEKPSLSAQPGPTVLAGESVTLSCSSWSSYDMYHLSTEGEAHERRFSAGPKVNGTFQADFPLGPATQGGTYRCFGSFHDSPYEWSKSSDPLLVSVTGNPSNSWPSPTEPSSKTGNPRHLHVLIGTSVVKLPFTILLFFLLHRWCSDKKNASVMDQGPAGNRTVNREDSDEQDHQEVSYA

SEQ ID NO: 253 - DNA, 615 bp, Homo sapiens
atggctggacctgccacccagagccccatgaagctgatggccctgcagctgctgctgtggcacagtgcactctggacagtgcaggaagccacccccctgggccctgccagctccctgccccagagcttcctgctcaagtgcttagagcaagtgaggaagatccagggcgatggcgcagcgctccaggagaagctgtgtgccacctacaagctgtgccaccccgaggagctggtgctgctcggacactctctgggcatcccctgggctcccctgagcagctgccccagccaggccctgcagctggcaggctgcttgagccaactccatagcggccttttcctctaccaggggctcctgcaggccctggaagggatctcccccgagttgggtcccaccttggacacactgcagctggacgtcgccgactttgccaccaccatctggcagcagatggaagaactgggaatggcccctgccctgcagcccacccagggtgccatgccggccttcgcctctgctttccagcgccgggcaggaggggtcctggttgcctcccatctgcagagcttcctggaggtgtcgtaccgcgttctacgccaccttgcccagccctga

SEQ ID NO: 254 - DNA, 800 bp, Homo sapiens
taatacgactcactatagggaaataagagagaaaagaagagtaagaagaaatataagagccaccatggctggacctgccacccagagccccatgaagctgatggccctgcagctgctgctgtggcacagtgcactctggacagtgcaggaagccacccccctgggccctgccagctccctgccccagagcttcctgctcaagtgcttagagcaagtgaggaagatccagggcgatggcgcagcgctccaggagaagctgtgtgccacctacaagctgtgccaccccgaggagctggtgctgctcggacactctctgggcatcccctgggctcccctgagcagctgccccagccaggccctgcagctggcaggctgcttgagccaactccatagcggccttttcctctaccaggggctcctgcaggccctggaagggatctcccccgagttgggtcccaccttggacacactgcagctggacgtcgccgactttgccaccaccatctggcagcagatggaagaactgggaatggcccctgccctgcagcccacccagggtgccatgccggccttcgcctctgctttccagcgccgggcaggaggggtcctggttgcctcccatctgcagagcttcctggaggtgtcgtaccgcgttctacgccaccttgcccagccctgaagcgctgccttctgcggggcttgccttctggccatgcccttcttctctcccttgcacctgtacctcttggtctttgaataaagcctgagtaggaaggcggccgctcgagcatgcatctaga

SEQ ID NO: 255 - DNA, 800 bp, Homo sapiens
taatacgactcactatagggaaataagagagaaaagaagagtaagaagaaatataagagccaccatggccggtcccgcgacccaaagccccatgaaacttatggccctgcagttgctgctttggcactcggccctctggacagtccaagaagcgactcctctcggacctgcctcatcgttgccgcagtcattccttttgaagtgtctggagcaggtgcgaaagattcagggcgatggagccgcactccaagagaagctctgcgcgacatacaaactttgccatcccgaggagctcgtactgctcgggcacagcttggggattccctgggctcctctctcgtcctgtccgtcgcaggctttgcagttggcagggtgcctttcccagctccactccggtttgttcttgtatcagggactgctgcaagcccttgagggaatctcgccagaattgggcccgacgctggacacgttgcagctcgacgtggcggatttcgcaacaaccatctggcagcagatggaggaactggggatggcacccgcgctgcagcccacgcagggggcaatgccggcctttgcgtccgcgtttcagcgcagggcgggtggagtcctcgtagcgagccaccttcaatcatttttggaagtctcgtaccgggtgctgagacatcttgcgcagccgtgaagcgctgccttctgcggggcttgccttctggccatgcccttcttctctcccttgcacctgtacctcttggtctttgaataaagcctgagtaggaaggcggccgctcgagcatgcatctaga

SEQ ID NO: 256 - RNA, 758 nt, Homo sapiens
gggaaauaagagagaaaagaagaguaagaagaaauauaagagccaccauggccggucccgcgacccaaagccccaugaaacuuauggcccugcaguugcugcuuuggcacucggcccucuggacaguccaagaagcgacuccucucggaccugccucaucguugccgcagucauuccuuuugaagugucuggagcaggugcgaaagauucagggcgauggagccgcacuccaagagaagcucugcgcgacauacaaacuuugccaucccgaggagcucguacugcucgggcacagcuuggggauucccugggcuccucucucguccuguccgucgcaggcuuugcaguuggcagggugccuuucccagcuccacuccgguuuguucuuguaucagggacugcugcaagcccuugagggaaucucgccagaauugggcccgacgcuggacacguugcagcucgacguggcggauuucgcaacaaccaucuggcagcagauggaggaacuggggauggcacccgcgcugcagcccacgcagggggcaaugccggccuuugcguccgcguuucagcgcagggcggguggaguccucguagcgagccaccuucaaucauuuuuggaagucucguaccgggugcugagacaucuugcgcagccgugaagcgcugccuucugcggggcuugccuucuggccaugcccuucuucucucccuugcaccuguaccucuuggucuuugaauaaagccugaguaggaag

SEQ ID NO: 257 - RNA, 716 nt, Homo sapiens
gggaaauaagagagaaaagaagaguaagaagaaauauaagagccaccaugaacuuucucuugucaugggugcacuggagccuugcgcugcugcuguaucuucaucacgcuaaguggagccaggccgcacccauggcggaggguggcggacagaaucaccacgaaguagucaaauucauggacguguaccagaggucguauugccauccgauugaaacucuuguggauaucuuucaagaauaccccgaugaaaucgaguacauuuucaaaccgucgugugucccucucaugaggugcgggggaugcugcaaugaugaaggguuggaguguguccccacggaggagucgaauaucacaaugcaaaucaugcgcaucaaaccacaucagggucagcauauuggagagauguccuuucuccagcacaacaaaugugaguguagaccgaagaaggaccgagcccgacaggaaaacccaugcggaccgugcuccgagcggcgcaaacacuuguucguacaagacccccagacaugcaagugcucauguaagaauaccgauucgcgguguaaggcgagacagcuggaauugaacgagcgcacguguaggugcgacaagccuagacggugagcugccuucugcggggcuugccuucuggccaugcccuucuucucucccuugcaccuguaccucuuggucuuugaauaaagccugaguaggaag

SEQ ID NO: 258 - RNA, 1316 nt, Homo sapiens
gggaaauaagagagaaaagaagaguaagaagaaauauaagagccaccaugcccccaucgggauugagauuguugccccuucugcuuccgcugcuuugguugcucguccugaccccuggcaggcccgcagcgggguugucgacguguaagacgauugacauggagcucgugaaacgcaagagaauugaagcaaucaggggucaaauucugagcaaacucagacucgcauccccaccgucccagggugaggucccaccgggaccucugcccgaggcgguccuggccuuguacaacucgacacgcgaccgagucgcaggggagucagcggaacccgagcccgaacccgaggccgacuacuacgccaaagaggucacucgggucuugaugguggaaacucacaacgaaaucuacgacaaguuuaagcagucgacccauucgaucuacauguucuucaauaccagcgagcuuagagaagcgguccccgagccgguacuuuuguccagagcggagcugcgguugcucaggcucaagcugaaaguggaacagcacguagagcuuuaucagaaguacagcaacaauucauggcgguaucucucgaaccggcuguuggcgccgucggauucacccgaauggcucagcuuugaugucacggggguggugcgccagugguuguccaggggcggagagaucgaaggauuucggcucucagcccacuguucgugugauagcagggacaacacgcuccaaguagauaucaacggauucacuacuggucgcagaggggaucuugcgacaauccacgguaugaaucgcccuuuucuccugcugauggccacaccccuugaacgggcgcaacaucuucagucaucccgccauaggagagcacuggacacgaacuacuguuuuucgucgacagagaagaauugcugcgugcggcagcuuuacaucgacuuccgaaaagaucucggguggaaauggauucaugaaccgaagggguaucacgccaacuucugccuggguccguguccuuauaucuggucguuggauacacaguauucaaagguguuggcucuuuacaaucagcacaacccgggagccucggcugcgccuuguugcguaccccaggcauuggagccauugccgauuguguauuaugugggaagaaagccgaaaguggagcaguugucgaauaugaucguacggagcugcaaaugcuccugauaagcugccuucugcggggcuugccuucuggccaugcccuucuucucucccuugcaccuguaccucuuggucuuugaauaaagccugaguaggaag
